(19) United States
(12) Patent Application Publication
(10) Pub. No.: US 2022/0205030 A1
(43) Pub. Date: Jun. 30, 2022

(54) VACCINE-INDUCED GENE SIGNATURES CORRELATING WITH PROTECTION AGAINST HIV AND SIV INFECTION

(71) Applicant: THE HENRY M. JACKSON FOUNDATION FOR THE ADVANCEMENT OF MILITARY MEDICINE, INC., BETHESDA, MD (US)

(72) Inventor: Rasmi THOMAS, Silver Spring, MD (US)

(21) Appl. No.: 17/429,698

(22) PCT Filed: Feb. 11, 2020
(86) PCT No.: PCT/US2020/017617

§ 371 Date: Aug. 10, 2021

Related U.S. Application Data
(60) Provisional application No. 62/803,724, filed on Feb. 11, 2019.

(51) Int. Cl. C12Q 1/6851; C12Q 1/6876

(52) U.S. Cl. CPC C12Q 1/6851; C12Q 2600/158; C12Q 1/6876

(57) ABSTRACT

Provided are methods for predicting effectiveness of vaccine against HIV or SIV. Provided herein also are methods for predicting protective immunity in a subject, comprising detecting expression levels of multiple genes or gene products, wherein the multiple genes have been identified as a differentially expressed gene set associated with protective immunity against HIV or SIV; calculating a first composite gene expression score (GES) for the differentially expressed gene set; and calculating an average second composite GES for the differentially expressed gene set in biological samples from subjects that have been vaccinated with a candidate vaccine and are not immune to the virus, wherein a first composite GES that is greater than the average second composite GES indicates the effectiveness of the vaccine and that the subject has protective immunity. Also provided are kits for predicting effectiveness of HIV or SIV vaccine and for predicting protective immunity following vaccination.

### CROSS-REFERENCE TO RELATED APPLICATION

[0001] This application claims the benefit of, and relies on the filing date of, U.S. provisional patent application No. 62/803,724, filed 11 Feb. 2019, the entire disclosure of which is incorporated herein by reference.

### GOVERNMENT INTEREST

[0002] This invention was made in part with Government support under grant number W81XWH-11-2-0174 awarded by the United States Army. The Government has certain rights in the invention.

### SEQUENCE LISTING

[0003] The present application contains a Sequence Listing which has been submitted electronically in ASCII format and is hereby incorporated by reference in its entirety. Said ASCII copy, created on 10 Feb. 2020, is named HMJ-164-PCT_SL.txt and is 656,835 bytes in size.

### FIELD

[0004] This application generally relates to human immunodeficiency virus (HIV) and simian immunodeficiency virus (SIV) vaccines and vaccine candidates.

### BACKGROUND

[0005] An estimated 1.8 million new cases of HIV infection were diagnosed worldwide in 2017, and approximately 36.9 million people are currently living with AIDS/HIV. Although AIDS-related deaths have been dramatically reduced in recent years, an estimated 940,000 people nonetheless died from AIDS-related complications worldwide in 2017, and there remains no cure.

[0006] Attempts at an efficacious preventative HIV vaccine for humans have been elusive to date. In one study, an HIV-1 vaccine showed partial efficacy in people from Thailand, although that efficacy was insufficient for development and subsequent use [S. Rerks-Ngarm et al., Vaccination with ALVAC and AIDSVAX to prevent HIV-1 infection in Thailand, The New England Journal of Medicine 361, 2209-2220 (2009)]. The study contained a combination of two vaccines (an ALVAC® prime and an AIDSVAX® boost) based on HIV strains common in Thailand. Although the efficacy of the study vaccine trial was only about 31%, mathematical modeling has demonstrated that with effective pre-exposure prophylaxis, the ability to reduce HIV risk by even 50 percent could be an effective public health approach to the HIV pandemic [J. Medlock et al., Effectiveness of UNAIDS targets and HIV vaccination across 127 countries, Proc. Natl. Acad. Sci. USA 2017 Apr. 11; 114(15):4017-4022].

[0007] Some vaccine regimens have shown at least this level of efficacy in non-human primate (NHP), SIV and Simian-Human Immunodeficiency Virus (SHIV) challenge models. In one study, for example, Barouch et al. identified a protective efficacy of greater than 50 percent in an SIV challenge study with an adenovirus serotype 26 (Ad26) prime, followed by purified envelope glycoprotein (gp140) boost vaccine regimen [D. H. Barouch et al., Protective efficacy of adenovirus/protein vaccines against SIV challenges in rhesus monkeys, Science 349, 320-324 (2015) (hereinafter “Barouch I”)]. These findings were replicated in an SHIV challenge model in an additional independent NHP study [D. H. Barouch et al., Evaluation of a mosaic HIV-1 vaccine in a multicentre, randomised, double-blind, placebo-controlled, phase 1/2a clinical trial (APPROACH) and in rhesus monkeys (NHP 13-19), Lancet 392, 232-243 (2018) (hereinafter “Barouch II”)].

[0008] Identification of gene signatures that are indicative of a protective immune response from acquiring HIV or SIV, such as gene signatures from the aforementioned studies, may be useful to predict immune responses of vaccinated subjects and to advance vaccine development.

### SUMMARY

[0009] One aspect of the present disclosure is directed to methods of predicting effectiveness of a human immunodeficiency virus (HIV) or a simian immunodeficiency virus (SIV) vaccine in a subject that has been vaccinated with the HIV or the SIV vaccine, the method comprising (a) detecting expression levels of multiple genes and/or gene products in a biological sample from the subject, wherein the multiple genes and/or gene products have been identified as a differentially expressed gene set associated with efficacy of the HIV or the SIV vaccine; (b) calculating a first composite gene expression score (GES) for the differentially expressed gene set in the biological sample from the subject; and (c) calculating an average second composite GES for the differentially expressed gene set in a plurality of biological samples from subjects that have been vaccinated with the HIV or SIV vaccine and are not immune to HIV or SIV, wherein a first composite GES that is greater than the average second composite GES indicates effectiveness of the HIV vaccine or the SIV infection. In certain embodiments, the method further comprises a step of identifying the differentially expressed gene set associated with efficacy of the HIV or the SIV vaccine. In certain embodiments, the method further comprises a step of adjusting treatment options for the subject based on the predicted effectiveness of the HIV or the SIV vaccine.

[0010] Another aspect of the present disclosure is directed to methods of predicting protective immunity to HIV or SIV infection in a subject that has been vaccinated with a HIV or SIV vaccine, the method comprising (a) detecting expression levels of multiple genes and/or gene products in a biological sample from the subject, wherein the multiple genes and/or gene products have been identified as a differentially expressed gene set associated with protective immunity against HIV or SIV; (b) calculating a first composite gene expression score (GES) for the differentially expressed gene set in the biological sample from the subject; and (c) calculating an average second composite GES for the differentially expressed gene set in biological samples from a plurality of subjects that have been vaccinated with the HIV or the SIV vaccine and are not immune to HIV or SIV, wherein a first composite GES that is greater than the average second composite GES indicates the subject that has been vaccinated with the HIV or the SIV vaccine has protective immunity to HIV or SIV infection. In certain embodiments, the method further comprises a step of identifying the differentially expressed gene set associated with protective immunity to HIV or SIV infection. In certain embodiments, the method further comprises a step of adjusting treatment options for the subject based on whether the subject is predicted to have protective immunity to HIV or SIV infection.

[0011] In some embodiments of all aspects of the present disclosure, the HIV or SIV vaccine comprises an adenovirus serotype 26 (Ad26) vector-based vaccine, a canarypox virus vector-based vaccine, or a retrovirus vector-based vaccine; in some embodiments of all aspects of the present disclosure, the HIV or SIV vaccine comprises an HIV or SIV envelope glycoprotein. In certain embodiments of all aspects of the disclosure, the subject that has been vaccinated with a HIV or SIV vaccine is a human, and in certain embodiments of all aspects of the disclosure, the subject is a non-human animal, such as a non-human primate.

[0012] In certain embodiments of all aspects of the disclosure, the HIV vaccine comprises a recombinant canarypox genetically engineered to express HIV-1 Gag and Pro (subtype B LAI strain) and CRF01_AE (subtype E) HIV-1 gp120 (92TH023) linked to the transmembrane 3 anchoring portion of gp41 (LAI). In some embodiments, the HIV vaccine comprises a bivalent HIV gp120 envelope glycoprotein vaccine containing a subtype E envelope from the HIV-1 strain A244 (CM244) and a subtype B envelope from the HIV-1 MN, optionally produced in Chinese hamster ovary cell lines.

[0013] In certain embodiments of all aspects of the disclosure, the differentially expressed gene set is associated with a B-cell gene signature or a monocyte gene signature. In some embodiments of all aspects of the disclosure, the biological sample is a blood sample, and in some embodiments of all aspects of the disclosure, the biological sample comprises peripheral blood mononuclear cells, such as lymphocytes, white blood cells, granulocytes, monocytes, macrophages, or any combination thereof.

[0014] In certain embodiments of all aspects of the disclosure, the first and second composite GES are calculated by averaging Z scores calculated by comparison to normalized gene expression for each gene in the differentially expressed gene set. In certain embodiments of all aspects of the disclosure, the normalized gene expression is measured from a biological sample of a subject or a pool of biological samples from subjects that have not been vaccinated with the HIV vaccine or the SIV vaccine and are not infected with HIV or SIV.

[0015] In certain embodiments of all aspects of the disclosure, the differentially expressed gene set comprises at least 3, at least 10, at least 15, at least 20, at least 25, at least 30, or 32 of the following genes: ACSL1, BHLHE40, CD4, CDC42EP3, CDC42EP4, CREB5, CREG1, DAPK1, DOCK5, EMILIN2, ERMAP, GAS7, GLA, IRAK3, LAMP2, LMNA, MGST2, NFIL3, NLRP3, OGFRL1, PHACTR2, RAB32, REEP4, RNF130, RRAGD, SDCBP, SIRPA, ST3GAL6, TKT, TNFRSF1B, TNFSF13, and VEGFA, and in certain embodiments of all aspects of the disclosure, the differentially expressed gene set comprises at least BHLHE40, OGFRL1, and TNFSF13.

[0016] In certain embodiments of all aspects of the disclosure, the differentially expressed gene set comprises at least 7, at least 10, at least 20, at least 30, at least 40, at least 50, at least 60, or 63 of the following genes: ADAM9, ALDH3B1, AMPD2, AP2S1, ARRB1, C5AR1, CAMKK2, CCR1, CD14, CD163, CD68, CEBPA, CSFIR, CST3, CTBP2, CTSD, DAPK1, DUSP6, FCGRT, FLVCR2, FZDJ, GAA, GAS7, GRN, HMOX1, IL17RA, IMPA2, KIAA0513, LEPROT, LGALS2, LMNA, LRPAP1, MAFB, MPP1, MYO1F, NAGA, NPL, PGD, PKM2, PSAP, PTGER2, PXN, PYGL, QPCT, RAB20, RBM47, RNF130, SCARB2, SEMA4A, SERINC5, SIRPA, SIRPB1, SLC36A1, SLCO3A1, SORT1, SULT1A2, TBC1D8, TBXAS1, TMP2, TKT, TYROBP, ZDHHC7, and ZNF467, and in certain embodiments of all aspects of the disclosure, the differentially expressed gene set comprises at least SEMA4A, SLC36A1, SERINC5, IL17RA, CTSD, CD68, and GAA.

[0017] In some embodiments of all aspects of the disclosure, the first composite GES is calculated based on measuring or detecting mRNA, cDNA, or protein products of the genes in the differentially expressed gene set in the biological sample. In other embodiments of all aspects of the disclosure, the second composite GES is calculated based on measuring or detecting mRNA, cDNA, or protein products of the genes in the differentially expressed gene set in the plurality of biological samples.

[0018] Another aspect of the present disclosure is directed to a kit for use in predicting efficacy and/or effectiveness of an HIV or SIV vaccine in a subject. In some embodiments, a kit is disclosed for predicting protective immunity to HIV or SIV infection in subjects that have received HIV or SIV vaccines, such as mammals that have received HIV or SIV vaccines. The kit comprises reagents for measuring or determining expression levels of a plurality of genes and/or gene products and instructions for how to use the kit. In certain embodiments, the kit comprises a plurality of probes for detecting BHLHE40, OGFRL1, and TNFSF13 and at least 5, at least 10, at least 15, at least 20, at least 25, or 29 of the following additional genes: ACSL1, CD4, CDC42EP3, CDC42EP4, CREB5, CREG1, DAPK1, DOCK5, EMILIN2, ERMAP, GAS7, GLA, IRAK3, LAMP2, LMNA, MGST2, NFIL3, NLRP3, PHACTR2, RAB32, REEP4, RNF130, RRAGD, SDCBP, SIRPA, ST3GAL6, TKT, TNFRSF1B, and VEGFA, wherein the plurality of probes contains probes for detecting no more than 500 different genes. In certain embodiments, the kit comprises a plurality of probes for detecting expression levels of genes and/or gene products selected from the group consisting of SEMA44A, SLC36A1, SERINC5, IL17RA, CTSD, CD68, GAA and at least 5, at least 10, at least 20, at least 30, at least 40, at least 50, or 56 genes selected from the group consisting of ADAM9, ALDH3B1, AMPD2, AP2S1, ARRB1, C5AR1, CAMKK2, CCR1, CD14, CD163, CEBPA, CSF1R, CST3, CTBP2, DAPK1, DUSP6, FCGRT, FLVCR2, FZD1, GAS7, GRN, HMOX1, IMPA2, KIAA0513, LEPROT, LGALS2, LMNA, LRPAP1, MAFB, MPP1, MYOIF, NAGA, NPL, PGD, PKM2, PSAP, PTGER2, PAN, PYGL, QPCT, RAB20, RBM47, RNF130, SCARB2, SIRPA, SIRPB1, SLCO3A1, SORT1, SULT1A2, TBC1D8, TBXAS1, TIMP2, TKT, TYROBP, ZDHHC7, and ZNF467.

[0019] In certain embodiments of the kits disclosed herein, the plurality of probes contains probes for detecting no more than 250, 100, 75, 63, 60, 50, 40, 32, 30, 25, 20, 15, 10, or 8 different genes. In certain embodiments, the plurality of probes is attached to the surface of an array. In certain embodiments, the plurality of probes may be detectably labeled.

### BRIEF DESCRIPTION OF THE DRAWINGS

[0020] The accompanying drawings, which are included to provide a further understanding of the disclosure, are incorporated in and constitute a part of this specification. The drawings illustrate embodiments of the disclosure and, together with the detailed description, serve to explain the principles of the disclosure. No attempt is made to show structural details of the disclosure in more detail than may be necessary for a fundamental understanding of the disclosure and various ways in which it may be practiced.

[0021] FIG. 1 is a plot showing an Area under Receiver Operating Characteristics (ROC) Curve (AUC) for the GES calculated from the Barouch I study samples.

[0022] FIG. 2 is a plot showing the Area under Receiver Operating Characteristics (ROC) Curves (AUC) for the GES calculated from the Barouch II study samples.

[0023] FIG. 3 is a Kaplan-Meier plot of the GES as a categorical variable showing the percentage of uninfected subjects after viral challenge over time for the Barouch I study samples with high (above mean) or low (below mean) GES.

[0024] FIG. 4 is a Kaplan-Meier plot of the GES as a categorical variable showing the percentage of uninfected subjects after viral challenge over time for the Barouch II study samples with high (above mean) or low (below mean) GES.

[0025] FIG. 5 is a scatter plot showing the composite GES calculated using 32 differentially expressed genes in the Barouch I study population (n=10) for protected and unprotected subjects.

[0026] FIG. 6 is a scatter plot showing the composite GES calculated using 52 differentially expressed genes in the Ad26/gp140 arm of the Barouch II study population (n=11) for protected and unprotected subjects.

[0027] FIG. 7 is a scatter plot showing the composite GES calculated using 62 differentially expressed genes in the Ad26/Ad26+gp140 arm of the Barouch II study population (n=12) for protected and unprotected subjects.

[0028] FIG. 8 is a scatter plot showing the composite GES is statistically significantly greater for the uninfected human subjects who received an HIV vaccine compared to the infected human subjects who received an HIV vaccine, as discussed in Example 2.

[0029] FIG. 9 is a Kaplan-Meier plot showing the probability of acquiring HIV-1 over a period of 36 months and showing that the probability is lower in individuals with higher GES, as discussed in Example 2.

[0030] FIG. 10 shows average percent vaccine efficacy, demonstrating that the vaccine efficacy is statistically significantly greater in individuals with a high GES compared to those with a low GES, as discussed in Example 2.

[0031] FIG. 11 shows specific genes in the signature are associated with protection from HIV acquisition. Panel A is a radar plot showing specific genes that are associated with a decreased time to infection in a RV144 human study (P<0.05, q<0.1), as discussed in Example 2. Panel B shows the average gene expression and percent gene expression in various cell lineages, as identified by single cell RNA-seq, demonstrating the genes as mostly expressed in cells from the myeloid lineage.

### DETAILED DESCRIPTION

[0032] The following detailed description is presented to enable any person skilled in the art to make and use the invention. For purposes of explanation, specific nomenclature is set forth to provide a thorough understanding of the present invention. However, it will be apparent to one skilled in the art that these specific details are not required to practice the invention. Descriptions of specific applications are provided only as representative examples. The present invention is not intended to be limited to the embodiments shown, but is to be accorded the widest possible scope consistent with the principles and features disclosed herein.

### Definitions

[0033] In order that the present invention may be more readily understood, certain terms are first defined. Additional definitions are set forth throughout the detailed description.

[0034] Throughout this specification and the claims which follow, unless the context requires otherwise, the word “comprise.” and variations such as “comprises” and “comprising,” will be understood to imply the inclusion of a stated integer or step or group of integers or steps but not the exclusion of any other integer or step or group of integers or steps. When used herein, the term “comprising” can be substituted with the term “containing” or “including” or sometimes when used herein with the term “having.”

[0035] When used herein “consisting of” excludes any element, step, or ingredient not specified in the claim element. When used herein, “consisting essentially of” does not exclude materials or steps that do not materially affect the basic and novel characteristics of the claim. Any of the aforementioned terms of “comprising,” “containing,” “including,” and “having,” whenever used herein in the context of an aspect or embodiment of the invention can be replaced with the term “consisting of” or “consisting essentially of” to vary scopes of the disclosure.

[0036] As used herein, the conjunctive term “and/or” between multiple recited elements is understood as encompassing both individual and combined options. For instance, where two elements are conjoined by “and/or,” a first option refers to the applicability of the first element without the second. A second option refers to the applicability of the second element without the first. A third option refers to the applicability of the first and second elements together. Any one of these options is understood to fall within the meaning, and therefore satisfy the requirement of the term “and/or” as used herein. Concurrent applicability of more than one of the options is also understood to fall within the meaning, and therefore satisfy the requirement of the term “and/or.”

[0037] The term “detecting” or “detection” means any of a variety of methods known in the art for determining the presence, absence, or amount of a nucleic acid or a protein. As used throughout the specification, the term “detecting” or “detection” includes either qualitative or quantitative detection.

[0038] The term “gene expression” refers to the expression level of a gene in a sample. As is understood in the art, the expression level of a gene can be analyzed by measuring the expression of a nucleic acid (e.g., mRNA or cDNA) or a polypeptide that is encoded by the nucleic acid.

[0039] The term “gene expression score” (GES) refers to a numerical value calculated by the Z score or an average of the Z scores of a gene or gene set in a sample or collection of samples relative to the normalized gene expression for the particular gene or gene set. As used herein, the Z score refers to the number of standard deviations above or below the mean, wherein the mean refers to the average gene expression score for a gene in all samples. The average of the Z scores for all genes across a sample set is equal to the GES. For example, in certain embodiments, the Z score may be calculated using the formula z=(X−μ)/std(X), wherein X is the gene expression for a particular gene in a sample, μ is the mean expression score of the gene for all samples, and std(X) is the standard deviation for the mean expression score.

[0040] As used herein, a “biological sample” comprises human or animal cells or nucleic acids or polypeptides isolated therefrom. A biological sample of the present disclosure includes, but is not limited to, a tissue sample, a cell sample, a blood sample, a serum sample, a semen or seminal fluid sample, a urine sample, a saliva sample, or any combination thereof.

[0041] The term “gene signature” refers to one or more genes or groups of genes having a characteristic pattern of expression that occurs as a result of a condition, such as immunity to a virus. The term is also used interchangeably in this application with “gene set” or “differentially expressed gene set.”

[0042] The term “isolated,” when used in the context of a polypeptide or nucleic acid refers to a polypeptide or nucleic acid that is substantially free of its natural environment and is thus distinguishable from a polypeptide or nucleic acid that might happen to occur naturally. For instance, an isolated polypeptide or nucleic acid is substantially free of cellular material or other polypeptides or nucleic acids from the cell or tissue source from which it was derived.

[0043] The term “normalized gene expression” refers to an average gene expression level for a given gene in a pool of samples that are free of the disease or virus.

[0044] The terms “polypeptide,” “peptide,” and “protein” are used interchangeably herein to refer to polymers of amino acids.

[0045] The term “polypeptide probe” as used herein refers to a labeled (e.g., fluorescently or isotopically labeled) polypeptide that can be used in a protein detection assay (e.g., mass spectrometry) to quantify a polypeptide of interest in a biological sample.

[0046] The term “primer” means a polynucleotide capable of binding to a region of a target nucleic acid, or its complement, and promoting nucleic acid amplification of the target nucleic acid. Generally, a primer will have a free 3′ end that can be extended by a nucleic acid polymerase. Primers also generally include a base sequence capable of hybridizing via complementary base interactions either directly with at least one strand of the target nucleic acid or with a strand that is complementary to the target sequence. A primer may comprise target-specific sequences and optionally other sequences that are non-complementary to the target sequence. These non-complementary sequences may comprise, for example, a promoter sequence or a restriction endonuclease recognition site.

[0047] As used herein, the term “HIV” refers to human immunodeficiency virus. HIV can be classified into two major subtypes (HIV-1 and HIV-2), each of which has many subtypes. In some embodiments, a human subject is infected with the HIV-1 or HIV-2 subtypes.

[0048] As used herein, the term “SIV” refers to simian immunodeficiency virus. It is recognized that SIV as a species of retrovirus can cause diseases in monkeys similar to that caused by HIV in humans.

[0049] As used herein, the term “viral infection” describes a diseased state in which a virus invades healthy cells, uses the cell's reproductive machinery to multiply or replicate and ultimately lyse the cell, resulting in cell death, release of viral particles, and the infection of other cells by the newly produced progeny viruses. Latent infection by certain viruses, e.g., HIV-1, is also a possible result of viral infection.

[0050] As used herein, the term “vaccine” refers to a substance administered to trigger or stimulate an immune response against a particular disease, such as HIV or SIV infection. The term vaccine comprises preventative vaccines and therapeutic vaccines. Preventative vaccines are designed to prevent a subject from acquiring a particular disease, such as HIV or SIV infection, or to only have a mild case of the disease. Therapeutic vaccines are intended to improve immune response to or alleviate symptoms of specific diseases.

[0051] The term “vaccine efficacy” as used herein refers to the percentage of reduction in disease incidence in a vaccinated group compared to an unvaccinated group under optimal or controlled conditions such as clinical trials.

[0052] The term “vaccine effectiveness” or “effectiveness of the vaccine” as used herein refers to the ability of a vaccine to reduce the risk of or to prevent outcomes of interest under typical field conditions. For example, in certain embodiments, vaccine effectiveness is determined based on the ability of the vaccine to reduce a subject's chances of acquiring a disease after exposure to the disease. A vaccine for a disease, such as HIV or SIV, may be considered effective if, after receiving the vaccine, a subject's chances of acquiring the disease are statistically significantly reduced.

[0053] The term “protective immunity” as used herein refers to the immunity of a subject induced by vaccination that offers protection against a subsequent infection of the causative agent of the disease of interest to which the vaccine is developed.

[0054] The term “correlate” as used herein refers to an attribute that is statistically associated with an endpoint in a vaccination study.

[0055] As used herein, “antibody-dependent cellular phagocytosis (ADCP)” refers to Fc receptor-dependent function of antibody-dependent cellular phagocytosis that provides mechanisms for clearance of virus and virus-infected cells by cells including monocytes and macrophages, as well as for stimulation of downstream adaptive immune responses by facilitating antigen presentation, or by stimulating the secretion of inflammatory mediators.

[0056] As used herein, the term “construct” refers to a recombinant nucleotide sequence, such as a recombinant nucleic acid molecule, that has been generated for the purpose of the expression of a specific nucleotide sequence(s), or is to be used in the construction of other recombinant nucleotide sequences.

[0057] As used herein, the term “viral vector” refers to either a nucleic acid molecule (e.g., a plasmid) that includes virus-derived nucleic acid elements that typically facilitate transfer of the nucleic acid molecule or integration into the genome of a cell or to a viral particle that mediates nucleic acid transfer. Viral particles will typically include various viral components and sometimes also host cell components in addition to nucleic acid(s). In particular, the terms “lentiviral vector,” “lentiviral expression vector,” etc. may be used to refer to lentiviral particles and/or lentiviral transfer plasmids of certain embodiments as described herein. The phrase “essential lentiviral protein” as used herein refers to those viral protein(s), other than envelope protein, that are required for the lentiviral life cycle. Essential lentiviral proteins may include those required for reverse transcription and integration and for the packaging (e.g., encapsidation) of a retroviral genome.

[0058] As used herein, the terms “subject,” “patient,” “individual,” and “host” used interchangeably herein, refer to a mammal, including, but not limited to, murines, felines, simians, humans, mammalian farm animals, mammalian sport animals, and mammalian pets. The term includes mammals that are infected with as well as those that are susceptible to infection by an immunodeficiency virus. In certain embodiments of all aspects of the disclosure, the term refers to a human infected with HIV. In certain embodiments of all aspects of the disclosure, the term refers to a non-human primate infected with SIV.

[0059] HUGO Gene Nomenclature Committee (HGNC) annotations are used to describe the genes discussed herein, all of which represent currently known gene sequences. The following Table 1 lists the HGNC annotations, Ensemble gene annotations, Entrezgene numbers, and gene name descriptions for genes discussed herein:

TABLE 1
HGNC and Ensembl Gene Annotations

| HGNC Symbol | HGNC | Ensembl | NCBI | |
|---|---|---|---|---|
| (SEQ ID NO:) | No. | Annotation | No. | Description |
| ACSL1 | 3569 | ENSG00000151726.14 | 2180 | acyl-CoA synthetase |
| (SEQ ID NO: 1) | | | | long-chain family |
| | | | | member 1 |
| ADAM9 | 216 | ENSG00000168615.12 | 8754 | ADAM |
| (SEQ ID NO: 2) | | | | metallopeptidase domain |
| | | | | 9 |
| AHNAK | 347 | ENSG00000124942.14 | 79026 | AHNAK nucleoprotein |
| (SEQ ID NO: 3) | | | | |
| ALDH3B1 | 410 | ENSG00000006534.16 | 221 | aldehyde |
| (SEQ ID NO: 4) | | | | dehydrogenase 3 family |
| | | | | member B1 |
| ALDOA | 414 | ENSG00000149925.20 | 226 | aldolase, fructose- |
| (SEQ ID NO: 5) | | | | bisphosphate A |
| AMPD2 | 469 | ENSG00000116337.19 | 271 | adenosine |
| (SEQ ID NO: 6) | | | | monophosphate |
| | | | | deaminase 2 |
| AOAH | 548 | ENSG00000136250.12 | 313 | acyloxyacyl hydrolase |
| (SEQ ID NO: 7) | | | | |
| AP2S1 | 565 | ENSG00000042753.11 | 1175 | adaptor related protein |
| (SEQ ID NO: 8) | | | | complex 2 subunit sigma |
| | | | | 1 |
| APOBR | 24087 | ENSG00000184730.11 | 55911 | apolipoprotein B |
| (SEQ ID NO: 9) | | | | receptor |
| ARHGEF10L | 25540 | ENSG00000074964.17 | 55160 | Rho guanine nucleotide |
| (SEQ ID NO: 10) | | | | exchange factor 10 like |
| ARRB1 | 711 | ENSG00000137486.17 | 408 | arrestin beta 1 |
| (SEQ ID NO: 11) | | | | |
| ATF3 | 785 | ENSG00000162772.17 | 467 | activating transcription |
| (SEQ ID NO: 12) | | | | factor 3 |
| BHLHE40 | 1046 | ENSG00000134107.5 | 8553 | basic helix-loop-helix |
| (SEQ ID NO: 13) | | | | family member e40 |
| CAMKK2 | 1470 | ENSG00000110931.19 | 10645 | calcium/calmodulin |
| (SEQ ID NO: 14) | | | | dependent protein kinase |
| | | | | 2 |
| CCR1 | 1602 | ENSG00000163823.4 | 1230 | C-C motif chemokine |
| (SEQ ID NO: 15) | | | | receptor 1 |
| CD14 | 1628 | ENSG00000170458.14 | 929 | CD14 molecule |
| (SEQ ID NO: 16) | | | | |
| CD68 | 1693 | ENSG00000129226.14 | 968 | CD68 molecule |
| (SEQ ID NO: 17) | | | | |
| CD86 | 1705 | ENSG00000114013.16 | 942 | CD86 molecule |
| (SEQ ID NO: 18) | | | | |
| CD163 | 1631 | ENSG00000177575.12 | 9332 | CD163 molecule |
| (SEQ ID NO: 19) | | | | |
| CD302 | 30843 | ENSG00000241399.7 | 9936 | CD302 molecule |
| (SEQ ID NO: 20) | | | | |
| CD4 | 1678 | ENSG00000010610.10 | 920 | CD4 molecule |
| (SEQ ID NO: 21) | | | | |
| CDC42EP3 | 16943 | ENSG00000163171.8 | 10602 | CDC42 effector protein |
| (SEQ ID NO: 22) | | | | 3 |
| CDC42EP4 | 17147 | ENSG00000179604.10 | 23580 | CDC42 effector protein |
| (SEQ ID NO: 23) | | | | 4 |
| CEBPA | 1833 | ENSG00000245848.3 | 1050 | CCAAT enhancer |
| (SEQ ID NO: 24) | | | | binding protein alpha |
| CEBPD | 1835 | ENSG00000221869.5 | 1052 | CCAAT enhancer |
| (SEQ ID NO: 25) | | | | binding protein delta |
| CLEC4A | 13257 | ENSG00000111729.14 | 50856 | C-type lectin domain |
| (SEQ ID NO: 26) | | | | family 4 member |
| CPD | 2301 | ENSG00000108582.12 | 1362 | carboxypeptidase D |
| (SEQ ID NO: 27) | | | | |
| CPPED1 | 25632 | ENSG00000103381.12 | 55313 | calcineurin like |
| (SEQ ID NO: 28) | | | | phosphoesterase domain |
| | | | | containing 1 |
| CREB5 | 16844 | ENSG00000146592.17 | 9586 | cAMP responsive |
| (SEQ ID NO: 29) | | | | element binding protein |
| | | | | 5 |
| CREG1 | 2351 | ENSG00000143162.9 | 8804 | cellular repressor of |
| (SEQ ID NO: 30) | | | | E1A stimulated genes 1 |
| CSF1R | 2433 | ENSG00000182578.13 | 1436 | colony stimulating |
| (SEQ ID NO: 31) | | | | factor 1 receptor |
| CSF3R | 2439 | ENSG00000119535.17 | 1441 | colony stimulating |
| (SEQ ID NO: 32) | | | | factor 3 receptor |
| CST1 | 2473 | ENSG00000170373.8 | 1469 | cystatin SN |
| (SEQ ID NO: 33) | | | | |
| CST3 | 2475 | ENSG00000101439.9 | 1471 | cystatin C |
| (SEQ ID NO: 34) | | | | |
| CTBP2 | 2495 | ENSG00000175029.17 | 1488 | C-terminal binding |
| (SEQ ID NO: 35) | | | | protein 2 |
| CTNNA1 | 2509 | ENSG00000044115.21 | 1495 | catenin alpha 1 |
| (SEQ ID NO: 36) | | | | |
| CTSD | 2529 | ENSG00000117984.14 | 1509 | cathepsin D |
| (SEQ ID NO: 37) | | | | |
| DAPK1 | 2674 | ENSG00000196730.13 | 1612 | death-associated protein |
| (SEQ ID NO: 38) | | | | kinase 1 |
| DOCK5 | 23476 | ENSG00000147459.18 | 80005 | dedicator of cytokinesis |
| (SEQ ID NO: 39) | | | | 5 |
| DUSP6 | 3072 | ENSG00000139318.8 | 1848 | dual specificity |
| (SEQ ID NO: 40) | | | | phosphatase 6 |
| EFHD2 | 28670 | ENSG00000142634.13 | 79180 | EF-hand domain family |
| (SEQ ID NO: 41) | | | | member D2 |
| EMILIN2 | 19881 | ENSG00000132205.11 | 84034 | elastin microfibril |
| (SEQ ID NO: 42) | | | | interface 2 |
| ENO1 | 3350 | ENSG00000074800.16 | 2023 | enolase 1 |
| (SEQ ID NO: 43) | | | | |
| ERMAP | 15743 | ENSG00000164010.15 | 114625 | erythroblast membrane- |
| (SEQ ID NO: 44) | | | | associated protein |
| OTULINL | 25629 | ENSG00000145569.6 | 54491 | OUT deubiquitinase |
| (FAM105A) | | | | with linear linkage |
| (SEQ ID NO: 45) | | | | specificity like |
| FBXL5 | 13602 | ENSG00000118564.15 | 26234 | F-box and leucine rich |
| (SEQ ID NO: 46) | | | | repeat protein 5 |
| FCGRT | 3621 | ENSG00000104870.13 | 2217 | Fc fragment of IgG |
| (SEQ ID NO: 47) | | | | receptor and transporter |
| FLVCR2 | 20105 | ENSG00000119686.1 | 55640 | FLVCR2 heme |
| (SEQ ID NO: 48) | | | | transporter 2 |
| FZD1 | 4038 | ENSG00000157240.4 | 8321 | frizzled class receptor 1 |
| (SEQ ID NO: 49) | | | | |
| GAA | 4065 | ENSG00000171298.13 | 2548 | glucosidase alpha, acid |
| (SEQ ID NO: 50) | | | | |
| GABARAPL1 | 4068 | ENSG00000139112.11 | 23710 | GABA type A receptor |
| (SEQ ID NO: 51) | | | | associated protein like 1 |
| GAS7 | 4169 | ENSG00000007237.18 | 8522 | growth arrest-specific 7 |
| (SEQ ID NO: 52) | | | | |
| GLA | 4296 | ENSG00000102393.11 | 2717 | galactosidase alpha |
| (SEQ ID NO: 53) | | | | |
| GNAO1 | 4389 | ENSG00000087258.15 | 2775 | G protein subunit alpha |
| (SEQ ID NO: 54) | | | | ol |
| GNS | 4422 | ENSG00000135677.11 | 2799 | glucosamine (N-acetyl)- |
| (SEQ ID NO: 55) | | | | 6-sulfatase |
| GRN | 4601 | ENSG00000030582.18 | 2896 | granulin precursor |
| (SEQ ID NO: 56) | | | | |
| H2AFY | 4740 | ENSG00000113648.16 | 9555 | macroH2A.1 histone |
| (MACROH2A1) | | | | (previously H2A histone |
| (SEQ ID NO: 57) | | | | family member Y) |
| HBEGF | 3059 | ENSG00000113070.8 | 1839 | heparin binding EGF |
| (SEQ ID NO: 58) | | | | like growth factor |
| HEXB | 4879 | ENSG00000049860.14 | 3074 | hexosaminidase subunit |
| (SEQ ID NO: 59) | | | | beta |
| HMOX1 | 5013 | ENSG00000100292.17 | 3162 | heme oxygenase 1 |
| (SEQ ID NO: 60) | | | | |
| HPSE | 5164 | ENSG00000173083.15 | 10855 | heparanase |
| (SEQ ID NO: 61) | | | | |
| HSBP1 | 5203 | ENSG00000230989.7 | 3281 | heat shock factor |
| (SEQ ID NO: 62) | | | | binding protein 1 |
| ICAM1 | 5344 | ENSG00000090339.9 | 3383 | intercellular adhesion |
| (SEQ ID NO: 63) | | | | molecule 1 |
| ID2 | 5361 | ENSG00000115738.10 | 3398 | inhibitor of DNA |
| (SEQ ID NO: 64) | | | | binding 2 |
| IL17RA | 5985 | ENSG00000177663.14 | 23765 | interleukin 17 receptor |
| (SEQ ID NO: 65) | | | | A |
| IMPA2 | 6051 | ENSG00000141401.12 | 3613 | inositol |
| (SEQ ID NO: 66) | | | | monophosphatase 2 |
| IRAK3 | 17020 | ENSG00000090376.11 | 11213 | interleukin-1 receptor- |
| (SEQ ID NO: 67) | | | | associated kinase 3 |
| KIAA0513 | 29058 | ENSG00000135709.12 | 9764 | KIAA0513 |
| (SEQ ID NO: 68) | | | | |
| KLF10 | 11810 | ENSG00000155090.15 | 7071 | Kruppel like factor 10 |
| (SEQ ID NO: 69) | | | | |
| LAMP2 | 6501 | ENSG00000005893.16 | 3920 | lysomal-associated |
| (SEQ ID NO: 70) | | | | membrane protein 2 |
| LEPROT | 29477 | ENSG00000213625.9 | 54741 | leptin receptor |
| (SEQ ID NO: 71) | | | | overlapping transcript |
| LGALS2 | 6562 | ENSG00000100079.7 | 3957 | galectin 2 |
| (SEQ ID NO: 72) | | | | |
| LMNA | 6636 | ENSG00000160789.20 | 4000 | lamin A/C |
| (SEQ ID NO: 73) | | | | |
| LRPAP1 | 6701 | ENSG00000163956.13 | 4043 | LDL receptor related |
| (SEQ ID NO: 74) | | | | protein associated |
| | | | | protein 1 |
| LST1 | 14189 | ENSG00000204482.10 | 7940 | leukocyte specific |
| (SEQ ID NO: 75) | | | | transcript 1 |
| MAFB | 6408 | ENSG00000204103.4 | 9935 | MAF bZIP transcription |
| (SEQ ID NO: 76) | | | | factor B |
| MAPKAPK3 | 6888 | ENSG00000114738.11 | 7867 | mitogen-activated |
| (SEQ ID NO: 77) | | | | protein kinase-activated |
| | | | | protein kinase 3 |
| MCL1 | 6943 | ENSG00000143384.13 | 4170 | MCL1-BCL2 family |
| (SEQ ID NO: 78) | | | | apoptosis regulator |
| MICAL2 | 24693 | ENSG00000133816.15 | 9645 | microtubule associated |
| (SEQ ID NO: 79) | | | | monooxygenase, |
| | | | | calponin and LIM |
| | | | | domain containing 2 |
| MGST2 | 7063 | ENSG00000085871.9 | 4258 | microsomal glutathione |
| (SEQ ID NO: 80) | | | | S-transferase 2 |
| MPP1 | 7219 | ENSG00000130830.15 | 4354 | membrane palmitoylated |
| (SEQ ID NO: 81) | | | | protein 1 |
| MYO1F | 7600 | ENSG00000142347.19 | 4542 | myosin IF |
| (SEQ ID NO: 82) | | | | |
| NAGA | 7631 | ENSG00000198951.12 | 4668 | alpha-N- |
| (SEQ ID NO: 83) | | | | acetylgalactosaminidase |
| NAMPT | 30092 | ENSG00000105835.12 | 10135 | nicotinamide |
| (SEQ ID NO: 84) | | | | phosphoribosyltransferase |
| NFIL3 | 7787 | ENSG00000165030.4 | 4783 | nuclear factor, |
| (SEQ ID NO: 85) | | | | interleukin 3 regulated |
| NLRP3 | 16400 | ENSG00000162711.17 | 114548 | NLR family, pyrin |
| (SEQ ID NO: 86) | | | | domain containing 3 |
| NPL | 16781 | ENSG00000135838.13 | 80896 | N-acetylneuraminate |
| (SEQ ID NO: 87) | | | | pyruvate lyase |
| OGFRL1 | 21378 | ENSG00000119900.9 | 79627 | opioid growth factor |
| (SEQ ID NO: 88) | | | | response like 1 |
| PHACTR2 | 20956 | ENSG00000112419.14 | 9749 | phosphatase and actin |
| (SEQ ID NO: 89) | | | | regulator 2 |
| PGD | 8891 | ENSG00000142657.21 | 5226 | phosphogluconate |
| (SEQ ID NO: 90) | | | | dehydrogenase |
| PKM2 | 9021 | ENSG00000067225.18 | 5315 | pyruvate kinase M1/2 |
| (SEQ ID NO: 91) | | | | |
| PSAP | 9498 | ENSG00000197746.14 | 5660 | prosaposin |
| (SEQ ID NO: 92) | | | | |
| PSTPIP1 | 9580 | ENSG00000140368.13 | 9051 | proline-serine-threonine |
| (SEQ ID NO: 93) | | | | phosphatase interacting |
| | | | | protein 1 |
| PTGER2 | 9594 | ENSG00000125384.7 | 5732 | prostaglandin E receptor |
| (SEQ ID NO: 94) | | | | 2 |
| PXN | 9718 | ENSG00000089159.16 | 5829 | paxillin |
| (SEQ ID NO: 95) | | | | |
| PYGL | 9725 | ENSG00000100504.17 | 5836 | glycogen phosphorylase |
| (SEQ ID NO: 96) | | | | L |
| QPCT | 9753 | ENSG00000115828.17 | 25797 | glutaminyl-peptide |
| (SEQ ID NO: 97) | | | | cyclotransferase |
| RAB20 | 18260 | ENSG00000139832.5 | 55647 | RAB20, member RAS |
| (SEQ ID NO: 98) | | | | oncogene family |
| RAB27A | 9766 | ENSG00000069974.16 | 5873 | RAB27A, member RAS |
| (SEQ ID NO: 99) | | | | oncogene family |
| RAB32 | 9772 | ENSG00000118508.5 | 10981 | RAB32, member RAS |
| (SEQ ID NO: 100) | | | | oncogene family |
| RBM47 | 30358 | ENSG00000163694.15 | 54502 | RNA binding motif |
| (SEQ ID NO: 101) | | | | protein 47 |
| REEP4 | 26176 | ENSG00000168476.12 | 80346 | receptor accessory |
| (SEQ ID NO: 102) | | | | protein 4 |
| RGS10 | 9992 | ENSG00000148908.15 | 6001 | regulator of G protein |
| (SEQ ID NO: 103) | | | | signaling 10 |
| RNF130 | 18280 | ENSG00000113269.14 | 55819 | ring finger protein 130 |
| (SEQ ID NO: 104) | | | | |
| RRAGD | 19903 | ENSG00000025039.15 | 58528 | ras-related GTP binding |
| (SEQ ID NO: 105) | | | | D |
| RTN1 | 10467 | ENSG00000139970.17 | 6252 | reticulon 1 |
| (SEQ ID NO: 106) | | | | |
| RXRA | 10477 | ENSG00000186350.12 | 6256 | retinoid X receptor alpha |
| (SEQ ID NO: 107) | | | | |
| SCARB2 | 1665 | ENSG00000138760.10 | 950 | scavenger receptor class |
| (SEQ ID NO: 108) | | | | B member 2 |
| SDCBP | 10662 | ENSG00000137575.12 | 6386 | syndecan binding |
| (SEQ ID NO: 109) | | | | protein (syntenin) |
| SEMA4A | 10729 | ENSG00000196189.13 | 64218 | semaphorin 4A |
| (SEQ ID NO: 110) | | | | |
| SERINC5 | 18825 | ENSG00000164300.17 | 256987 | serine incorporator 5 |
| (SEQ ID NO: 111) | | | | |
| SIRPA | 9662 | ENSG00000198053.11 | 140885 | signal-regulatory protein |
| (SEQ ID NO: 112) | | | | alpha |
| SIRPB1 | 15928 | ENSG00000101307.15 | 10326 | signal regulatory protein |
| (SEQ ID NO: 113) | | | | beta 1 |
| SLC27A3 | 10997 | ENSG00000143554.14 | 11000 | solute carrier family 27 |
| (SEQ ID NO: 114) | | | | member 3 |
| SLC31A2 | 11017 | ENSG00000136867.11 | 1318 | solute carrier family 31 |
| (SEQ ID NO: 115) | | | | member 2 |
| SLC36A1 | 18761 | ENSG00000123643.13 | 206358 | solute carrier family 36 |
| (SEQ ID NO: 116) | | | | member 1 |
| SLCO3A1 | 10952 | ENSG00000176463.14 | 28232 | solute carrier organic |
| (SEQ ID NO: 117) | | | | anion transporter family |
| | | | | member 3A1 |
| SORT1 | 11186 | ENSG00000134243.12 | 6272 | sortilin 1 |
| (SEQ ID NO: 118) | | | | |
| ST3GAL6 | 18080 | ENSG00000064225.12 | 10402 | ST3 beta-galactoside |
| (SEQ ID NO: 119) | | | | alpha-2,3- |
| | | | | sialyltransferase 6 |
| STX11 | 11429 | ENSG00000135604.10 | 8676 | syntaxin 11 |
| (SEQ ID NO: 120) | | | | |
| SULT1A2 | 11454 | ENSG00000197165.11 | 6799 | sulfotransferase family |
| (SEQ ID NO: 121) | | | | 1A member 2 |
| TBC1D8 | 17791 | ENSG00000204634.12 | 11138 | TBC1 domain family |
| (SEQ ID NO: 122) | | | | member 8 |
| TBXAS1 | 11609 | ENSG00000059377.17 | 6916 | thromboxane A synthase |
| (SEQ ID NO: 123) | | | | 1 |
| TIMP2 | 11821 | ENSG00000035862.12 | 7077 | TIMP metallopeptidase |
| (SEQ ID NO: 124) | | | | inhibitor 2 |
| TKT | 11834 | ENSG00000163931.16 | 7086 | transketolase |
| (SEQ ID NO: 125) | | | | |
| TNFRSF1B | 11917 | ENSG00000028137.19 | 7133 | tumor necrosis factor |
| (SEQ ID NO: 126) | | | | receptor superfamily |
| | | | | member 1B |
| TNFSF12 | 11927 | ENSG00000239697.11 | 8742 | tumor necrosis factor |
| (SEQ ID NO: 127) | | | | superfamily member 12 |
| TNFSF13 | 11928 | ENSG00000161955.16 | 8741 | tumor necrosis factor |
| (SEQ ID NO: 128) | | | | superfamily member 13 |
| TRIB1 | 16891 | ENSG00000173334.4 | 10221 | tribbles pseudokinase 1 |
| (SEQ ID NO: 129) | | | | |
| TYROBP | 12449 | ENSG00000011600. | 730512 | TYRO protein tyrosine |
| (SEQ ID NO: 130) | | | | kinase binding protein |
| VIM | 12692 | ENSG00000026025.16 | 7431 | vimentin |
| (SEQ ID NO: 131) | | | | |
| VEGFA | 12680 | ENSG00000112715. | 7422 | vascular endothelial |
| (SEQ ID NO: 132) | 23 | | | growth factor A |
| VPS37C | 26097 | ENSG00000167987.11 | 55048 | VPS37C, ESCRT-I |
| (SEQ ID NO: 133) | | | | subunit |
| WDFY3 | 20751 | ENSG00000163625.15 | 23001 | WD repeat and FYVE |
| (SEQ ID NO: 134) | | | | domain containing 3 |
| ZDHHC7 | 18459 | ENSG00000153786.12 | 55625 | zinc finger DHHC-type |
| (SEQ ID NO: 135) | | | | palmitoyltransferase 7 |
| ZNF467 | 23154 | ENSG00000181444.13 | 168544 | zinc finger protein 467 |
| (SEQ ID NO: 136) | | | | |

[0060] Disclosed herein is an orthogonal approach to identifying differentially expressed genes or gene signatures that correlate to immunity against a virus and using those differentially expressed genes or gene signatures to evaluate vaccine efficacy or the ability of a vaccine or vaccine candidate to confer protective immunity to a subject. The gene signatures disclosed herein may be a broad indicator of effective vaccination against a range of RNA viruses, including, for example, HIV, SIV, influenza, and yellow fever vaccines.

[0061] Vaccines

[0062] Disclosed herein are methods for evaluating vaccine efficacy and vaccine effectiveness, as well as methods for predicting protective immunity, in subjects who have received vaccination against HIV or SIV infection. The vaccine may comprise a primer vaccine and a booster vaccine. In some embodiments of all aspects of the disclosure, an HIV vaccine is used. The HIV vaccine may comprise one or more primer vaccines and one or more booster vaccines. The HIV vaccine may comprise one or more recombinant proteins, one or more recombinant nucleic acid molecules, and combination thereof. In certain embodiments of all aspects of the disclosure, the one or more recombinant nucleic acid vaccine molecules comprise recombinant viral vector vaccines. The recombinant viral vectors may include, but are not limited to, vaccinia vectors, adenovirus vectors, adeno-associated virus vectors, canarypox virus vectors, herpes simplex virus vectors, human papillomavirus vectors, modified vaccinia Ankara (MVA) vectors, and retroviral vectors.

[0063] In some embodiments of all aspects of the disclosure, the recombinant viral vaccine is ALVAC-HIV (vCP1521). ALVAC-HIV (vCP1521) is a recombinant canarypox vaccine developed by Virogenetics Corporation (Troy, N.Y.) and manufactured by Sanofi Pasteur (Marcy-l'Etoille, France). The recombinant canarypox was genetically engineered to express HIV-1 Gag and Pro (subtype B LAI strain) and CRFO1_AE (subtype E) HIV-1 gp120 (92TH023) linked to the transmembrane 3 anchoring portion of gp41 (LAI). In some embodiments of all aspects of the disclosure, the recombinant viral vaccine is AIDSVAX® B/E. AIDSVAX® B/E (Global Solutions for Infectious Diseases, South San Francisco, Calif.) is a bivalent HIV gp120 envelope glycoprotein vaccine containing a subtype E envelope from the HIV-1 strain A244 (CM244) and a subtype B envelope from the HIV-1 MN produced in Chinese hamster ovary cell lines. In some embodiments of all aspects of the disclosure, the recombinant viral vaccine is Ad26.Mos.HIV may be used. Ad26.Mos.HIV is an HIV vaccine expressing mosaic HIV-1 envelope (Env)/Gag/Pol antigens. In some embodiments of all aspects of the disclosure, a booster vaccine may be used including, but not limited to, Ad26.Mos.HIV or modified vaccinia Ankara (MVA) vectors with or without high-dose (250 μg) or low-dose (50 μg) aluminum adjuvanted clade C Env gp140 protein as described, for example, by Barouch II.

[0064] As used herein, the terms “HIV antigen,” “antigenic polypeptide of an HIV,” “HIV antigenic polypeptide,” “HIV antigenic protein,” “HIV immunogenic polypeptide,” and “HIV immunogen” all refer to a polypeptide capable of inducing an immune response, e.g., a humoral and/or cellular mediated immune response, against HIV in a subject. The HIV antigen can be a protein of HIV (e.g., HIV gag, pol and env gene products), a fragment or epitope thereof, or a combination of multiple HIV proteins or portions thereof, that can induce an immune response against HIV in a subject. An HIV antigen is capable of protective immunity in a subject.

[0065] In certain embodiments of all aspects of the disclosure, the HIV antigen can be an HIV-1 or HIV-2 antigen or fragment(s) thereof. Examples of HIV antigens include, but are not limited to gag, pol, and env gene products, which encode structural proteins and essential enzymes. Gag, pol, and env gene products are synthesized as polyproteins, which are further processed into multiple other protein products. The primary protein product of the gag gene is the viral structural protein gag polyprotein, which is further processed into MA, CA, SP1, NC, SP2, and P6 protein products. The pol gene encodes viral enzymes (Pol, polymerase), and the primary protein product is further processed into RT, RNase H, IN, and PR protein products. The env gene encodes structural proteins, specifically glycoproteins of the virion envelope. The primary protein product of the env gene is gp160, which is further processed into gp120 and gp41. A heterologous nucleic acid sequence as disclosed herein may encode a gag, env, and/or pol gene product, or portion thereof.

[0066] In some embodiments of all aspects of the disclosure, an SIV vaccine is used. An SIV vaccine may comprise Ad26 vectors expressing SIVsmE543 Env, Gag, and Pol and boosted with AS01B-adjuvanted SIVmac32H Env gp140, and Ad35 vectors expressing SIVsmE543 Env/Gag/Pol antigens as described, for example, by Barouch I. In some embodiments, the SIV vaccine can be Ad26, Ad35, or Ad5HVR48 vectors expressing Env/Gag/Pol and/or 0.25 mg purified Env gp140 protein with AS01B adjuvant system as described, for example, by Barouch I.

[0067] Evaluating Vaccine Efficacy and Effectiveness and Predicting Protective Immunity

[0068] Disclosed herein are methods of evaluating vaccine efficacy and/or effectiveness against a virus, such as HIV or SIV, in a subject, for example in a subject that has been vaccinated against the virus. In certain embodiments, the method of evaluating vaccine efficacy and/or effectiveness comprises detecting expression of multiple genes and/or gene products in a biological sample from the subject, wherein the multiple genes and/or gene products have been identified as a differentially expressed gene set associated with efficacy of a vaccine; calculating a first composite gene expression score (GES) for the differentially expressed gene set in the biological sample from the subject; and calculating an average second composite GES for the differentially expressed gene set in a plurality of biological samples from subjects that have been vaccinated with the candidate HIV and SIV vaccine and are not immune to HIV or SIV. In certain embodiments, if the first composite GES is greater than the average second composite GES, it indicates effectiveness of the vaccine. In certain embodiments, the vaccine may be a candidate vaccine whose efficacy is being evaluated in a study population, for example a non-human primate study population or a human population. In certain embodiments, the method further comprises a step of identifying the differentially expressed gene set associated with efficacy and/or effectiveness of the vaccine. In certain embodiments, the method further comprises a step of adjusting treatment options for the subject based on the predicted effectiveness of the vaccine in the subject.

[0069] Disclosed herein are methods of predicting protective immunity against a virus, such as HIV or SIV, in a subject, for example in a subject that has been vaccinated against the virus. In certain embodiments, the method of predicting protective immunity comprises detecting expression of multiple genes and/or gene products in a biological sample from the subject, wherein the multiple genes and/or gene products have been identified as a differentially expressed gene set associated with protective immunity against HIV or SIV; calculating a first composite gene expression score (GES) for the differentially expressed gene set in the biological sample from the subject; and calculating an average second composite GES for the differentially expressed gene set in a plurality of biological samples from subjects that have been vaccinated with the candidate HIV and SIV vaccine and are not immune to HIV or SIV. In certain embodiments, if the first composite GES is greater than the average second composite GES, it indicates that the subject that has been vaccinated with the vaccine has protective immunity against the virus. In certain embodiments, the vaccine may be a candidate vaccine whose efficacy is being evaluated in a study population, for example a non-human primate study population or a human population. In other embodiments, a biological sample from the subject is being evaluated to determine whether protective immunity has been conferred from a particular vaccine or candidate vaccine to the subject. In certain embodiments, the method further comprises a step of identifying the differentially expressed gene set associated with protective immunity against HIV or SIV. In certain embodiments, the method further comprises a step of adjusting treatment options for the subject based on whether the subject is indicated to have protective immunity against HIV or SIV.

[0070] Also disclosed herein are methods of collecting data for evaluating protective immunity against a virus, such as HIV or SIV, in a subject, for example a subject that has been vaccinated against the virus. In certain embodiments, the method of collecting data for evaluating protective immunity comprises detecting expression of multiple genes and/or gene products in a biological sample from the subject, wherein the multiple genes and/or gene products have been identified as a differentially expressed gene set associated with protective immunity against HIV or SIV, calculating a first composite GES based on the expression of the genes, and calculating an average second composite GES based on expression of the genes in the differentially expressed gene set in a plurality of biological samples from subjects that are not immune to the virus. In certain embodiments, the subjects that are not immune to the virus have been vaccinated against the virus but did not acquire protective immunity; in some embodiments, the subjects that are not immune to the virus have not been vaccinated against the virus and have acquired the virus. In certain embodiments, the method further comprises a step of identifying the differentially expressed gene set associated with protective immunity against HIV or SIV. In certain embodiments, the method further comprises a step of adjusting treatment options for the subject based on whether the subject is identified as having protective immunity against HIV or SIV based on the GES scores.

[0071] A GES may be calculated for a gene or gene set based on the differential expression of the genes and/or gene products relative to a normalized expression for the genes and/or gene products. The GES may be calculated by calculating the Z score or an average of the Z scores of a gene or gene product or gene set in a sample or collection of samples relative to the mean differential gene expression for the particular gene or gene product or gene set. Normalized gene expression may, in certain embodiments, be measured by calculating an average gene or gene product expression from a biological sample or pool of biological samples from subjects that have not been vaccinated with the vaccine and are not infected with the virus. In certain embodiments of all aspects of the disclosure, normalized gene expression for a gene or gene product may be available, for example in a published online database.

[0072] In certain embodiments of all aspects of the disclosure, the Z score is calculated as (X−μ)/std(X), wherein X is the gene expression score for a particular gene and/or gene product in a sample, μ is the mean expression score of the genes and/or gene products in the gene set for that sample, and std(X) is the standard deviation for the mean expression score. In certain embodiments of all aspects of the disclosure, std(X) may calculated as the square root of the variance (σ), wherein σ=[(X−m)²]/(n−1), wherein n equals the number of samples in the sample set. In certain embodiments of all aspects of the disclosure, the GES is correlated to protection from viral acquisition in that the higher the GES, the greater the protection from viral acquisition. The composite GES is the average GES calculated for a gene or gene set. A GES may be calculated based on measuring or detecting mRNA, cDNA, or protein levels of genes in the differentially expressed gene set.

[0073] In certain embodiments of all aspects of the disclosure, the higher the first composite GES relative to the second composite GES score, the less likely a subject is to acquire a particular virus if the subject is exposed to the virus, i.e., the greater the likelihood that the vaccine has been effective to confer immunity to the virus.

[0074] In certain embodiments of all aspects of the disclosure, the vaccine is a candidate vaccine, such as a candidate HIV or SIV vaccine. In certain embodiments, the vaccine comprises an Ad26 vector, an envelope glycoprotein, such as an HIV or SIV envelope glycoprotein, or a combination of both an Ad26 vector and an envelope glycoprotein.

[0075] A differentially expressed gene set associated with protective immunity may be identified by any means known in the art. In certain embodiments of all aspects of the disclosure, the differentially expressed gene set may have been previously identified. In other embodiments of all aspects of the disclosure, the differentially expressed gene set may be identified using any of the methods disclosed herein for the detection of gene expression. According to various embodiments disclosed herein, the differentially expressed gene set is associated with a B-cell gene signature. According to various embodiments disclosed herein, the differentially expressed gene set is associated with a monocyte gene signature.

[0076] Differentially Expressed Gene Set Indicative of Vaccine Efficacy and Protective Immunity

[0077] Disclosed herein is a differentially expressed gene set that can be used to calculate composite GES in the methods disclosed herein. In certain embodiments of all aspects of the disclosure, the differentially expressed gene set disclosed herein may be used to evaluate protective immunity against an RNA virus, such as HIV or SIV. In certain embodiments of all aspects of the disclosure, the differentially expressed gene set can be used to evaluate protective immunity in a human subject or group of human subjects. In other embodiments of all aspects of the disclosure, the differentially expressed gene set can be used to evaluate protective immunity in a non-human primate subject or group of non-human primate subjects.

[0078] As discussed above, two independent preclinical non-human primate (NHP) challenge studies, Barouch I and Barouch II, showed partial vaccine efficacy with an Ad26-based HIV-1 vaccine candidate that elicited strong antibody responses. In Barouch I, the protective efficacy of an Ad26 vector priming followed by boosting with a purified envelope (Env) glycoprotein was evaluated. The priming Ad26 vector expressed SIVsmE543 Eng/Gag/Pol antigens, and the booster comprised AS01B-adjuvanted SIVmac32H Env gp140. It was found that 50% of the vaccinated NHPs exhibited protection after multiple intrarectal challenges with SIVmac251, while 100% of the non-vaccinated NHP controls exhibited viral acquisition. In Barouch II, a vaccine regimen comprising a mosaic Ad26/Ad26 vaccine followed by a gp140 vaccine boost was evaluated after multiple intrarectal challenges with SHIV-SF162P3.

[0079] Transcriptomic profiling of cryopreserved samples from these studies by RNA sequencing at time points after vaccination but prior to viral challenge identified a differentially expressed gene set in B cells that associated with protection from viral acquisition in both studies. Protection was also observed in a human trial that previously showed vaccine efficacy and in two additional NHP studies, where canarypox-based vaccine regimens were evaluated. See Rerks-Ngarm, S. et al., Vaccination with ALVAC and AIDSVAX to prevent HIV-1 infection in Thailand, NEW ENG. J. MED. 361, 2209-20 (2009); Vaccari, M., et al., Adjuvant-dependent innate and adaptive immune signatures of risk of SIVmac251 acquisition, NAT. MED., 22, 762-70 (2016); and Vaccari, M. et al., HIV vaccine candidate activation of hypoxia and the inflammasome in CD14(+) monoctyes is associated with a decreased risk of SIVmac251 acquisition, NAT. MED. 24, 847-56 (2018). The B-cell gene signature disclosed herein may therefore be associated with a higher magnitude of functional antibody responses in various vaccine regimens, including Ad26-based vaccine and envelope glycoprotein-based vaccine regimens.

[0080] In various embodiments, disclosed herein is a method for predicting effectiveness of a vaccine against HIV or SIV in a subject that has been vaccinated with the vaccine, the method comprising detecting expression of multiple genes and/or gene products in a biological sample from the subject, wherein the multiple genes and/or gene products have been identified as a differentially expressed gene set associated with efficacy of the vaccine and comprise at least 3, at least 10, at least 15, at least 20, at least 25, at least 30, or 32 of the following genes: ACSL1, BHLHE40, CD4, CDC42EP3, CDC42EP4, CREB5, CREG1, DAPK1, DOCK5, EMILIN2, ERMAP, GAS7, GLA, IRAK3, LAMP2, LMNA, MGST2, NFIL3, NLRP3, OGFRL1, PHACTR2, RAB32, REEP4, RNF130, RRAGD, SDCBP, SIRPA, ST3GAL6, TKT, TNFRSF1B, TNFSF13, and VEGFA. The method further comprises calculating a first composite GES for the differentially expressed gene set in the biological sample from the subject, and calculating an average second composition GES for the differentially expressed gene set in a plurality of biological samples from subjects that have been vaccinated with the vaccine and are not immune to the virus, wherein a first composite GES that is greater than the average second composite GES indicates effectiveness of the vaccine. In certain embodiments, the differentially expressed gene set comprises at least BHLHE40, OGFRL1, and TNFSF13. In certain embodiments, the method further comprises identifying the differentially expressed gene set. In certain embodiments, the method further comprises a step of adjusting treatment options for the subject based on the predicted effectiveness of the vaccine in the subject.

[0081] In various embodiments, disclosed herein is a method for predicting protective immunity against a virus in a subject that has been vaccinated with a vaccine, the method comprising detecting expression of multiple genes and/or gene products in a biological sample from the subject, wherein the multiple genes and/or gene products have been identified as a differentially expressed gene set associated with protective immunity against HIV or SIV and comprise at least 3, at least 10, at least 15, at least 20, at least 25, at least 30, or 32 of the following genes: ACSL1, BHLHE40, CD4, CDC42EP3, CDC42EP4, CREB5, CREG1, DAPK1, DOCK5, EMILIN2, ERMAP, GAS7, GLA, IRAK3, LAMP2, LMNA, MGST2, NFIL3, NLRP3, OGFRL1, PHACTR2, RAB32, REEP4, RNF130, RRAGD, SDCBP, SIRPA, ST3GAL6, TKT, TNFRSF1B, TNFSF13, and VEGFA. The method further comprises calculating a first composite GES for the differentially expressed gene set in the biological sample from the subject, and calculating an average second composition GES for the differentially expressed gene set in a plurality of biological samples from subjects that have been vaccinated with the vaccine and are not immune to the virus, wherein a first composite GES that is greater than the average second composite GES indicates the subject that has been vaccinated with the candidate vaccine has protective immunity against the virus. In certain embodiments, the differentially expressed gene set comprises at least BHLHE40, OGFRL1, and TNFSF13. In certain embodiments, the method further comprises identifying the differentially expressed gene set. In certain embodiments, the method further comprises a step of adjusting treatment options for the subject based on whether the subject is indicated to have protective immunity against HIV or SIV.

[0082] In various embodiments, disclosed herein is a method for predicting effectiveness of a vaccine against HIV or SIV in a subject that has been vaccinated with the vaccine, the method comprising detecting expression levels of multiple genes and/or gene products in a biological sample from the subject, wherein the multiple genes and/or gene products have been identified as a differentially expressed gene set associated with efficacy of the vaccine and comprise at least 5, at least 6, at least 10, at least 20, at least 30, at least 40, at least 50, at least 60, or 62 of the following genes: ACSL1, AHNAK, AOAH, ARHGEF10L, ARRB1, BHLHE40, CAMKK2, CD86, CD163, CDC42EP3, CEBPA, CEBPD, CLEC4A, CPD, CPPED1, CREB5, CREG1, CSF3R, CST1, CTNNA1, DAPK1, DOCK5, EMILIN2, ENO1, ERMAP, FAM105A, FBXL5, GLA, GNS, HBEGF, HEXB, HPSE, HSBPJ, ID2, IRAK3, KIAA0513, LAMP2, LMNA, MAFB, MAPKAPK3, MICAL2, MYOIF, NFIL3, OGFRL1, PGD, PSAP, RAB27A, RNF130, RRAGD, RXRA, SCARB2, SDCBP, SEMA4A, SLC31A2, SLC36A1, STX11, TBC1D8, TNFRSF1B, TNFSF13, VEGFA, VPS37C, and WDFY3. The method further comprises calculating a first composite GES for the differentially expressed gene set in the biological sample from the subject, and calculating an average second composition GES for the differentially expressed gene set in a plurality of biological samples from subjects that have been vaccinated with the vaccine and are not immune to the virus, wherein a first composite GES that is greater than the average second composite GES indicates effectiveness of the vaccine. In certain embodiments, the differentially expressed gene set comprises at least CREB5, DOCK5, ERMAP, IRAK3, OGFRL1, and RNF130. In certain embodiments, the method further comprises identifying the differentially expressed gene set. In certain embodiments, the method further comprises a step of adjusting treatment options for the subject based on the predicted effectiveness of the vaccine in the subject.

[0083] In various embodiments, disclosed herein is a method for predicting protective immunity against a virus in a subject that has been vaccinated with a vaccine, the method comprising detecting expression levels of multiple genes and/or gene products in a biological sample from the subject, wherein the multiple genes and/or gene products have been identified as a differentially expressed gene set associated with protective immunity against HIV or SIV and comprise at least 5, at least 6, at least 10, at least 20, at least 30, at least 40, at least 50, at least 60, or 62 of the following genes: ACSL1, AHNAK, AOAH, ARHGEF10L, ARRB1, BHLHE40, CAMKK2, CD86, CD163, CDC42EP3, CEBPA, CEBPD, CLEC4A, CPD, CPPED1, CREB5, CREG1, CSF3R, CST1, CTNNA1, DAPK1, DOCK5, EMILIN2, ENO1, ERMAP, FAM105A, FBXL5, GLA, GNS, HBEGF, HEXB, HPSE, HSBP1, ID2, IRAK3, KIAA0513, LAMP2, LMNA, MAFB, MAPKAPK3, MICAL2, MYOIF, NFIL3, OGFRL1, PGD, PSAP, RAB27A, RNF130, RRAGD, RXRA, SCARB2, SDCBP, SEMA4A, SLC31A2, SLC36A1, STX11, TBC1D8, TNFRSF1B, TNFSF13, VEGFA, VPS37C, and WDFY3. The method further comprises calculating a first composite GES for the differentially expressed gene set in the biological sample from the subject, and calculating an average second composition GES for the differentially expressed gene set in a plurality of biological samples from subjects that have been vaccinated with the vaccine and are not immune to the virus, wherein a first composite GES that is greater than the average second composite GES indicates the subject that has been vaccinated with the candidate vaccine has protective immunity against the virus. In certain embodiments, the differentially expressed gene set comprises at least CREB5, DOCK5, ERMAP, IRAK3, OGFRL1, and RNF130. In certain embodiments, the method further comprises identifying the differentially expressed gene set. In certain embodiments, the method further comprises a step of adjusting treatment options for the subject based on whether the subject is indicated to have protective immunity against HIV or SIV.

[0084] In various embodiments, disclosed herein is a method for predicting effectiveness of a vaccine against HIV or SIV in a subject that has been vaccinated with the vaccine, the method comprising detecting expression levels of multiple genes and/or gene products in a biological sample from the subject, wherein the multiple genes and/or gene products have been identified as a differentially expressed gene set associated with efficacy of the vaccine and comprise at least 5, at least 6, at least 10, at least 20, at least 30, at least 40, at least 50, or 52 of the following genes: ALDOA, AOAH, AP2S1, APOBR, ARHGEF10L, ATF3, CD163, CEBPD, CLEC4A, CREB5, CSFIR, CSF3R, CST3, CTNNAL, DOCK5, DUSP6, EFHD2, ERMAP, FCGRT, GAA, GABARAPL1, GNAO, GRN, H2AFY, HBEGF, HSBP1, ICAM1, IRAK3, IL17RA, KIAA0513, KLF10, LST1, MAFB, MCL1, NAGA, NAMPT, NLRP3, OGFRL1, PSAP, PSTPIP1, RAB32, RGS10, RNF130, SIRPA, SLCO3A1, TBC1D8, TKT, TNFSF13, TRIB1, TYROBP, VIM, and WDFY3. The method further comprises calculating a first composite GES for the differentially expressed gene set in the biological sample from the subject, and calculating an average second composition GES for the differentially expressed gene set in a plurality of biological samples from subjects that have been vaccinated with the vaccine and are not immune to the virus, wherein a first composite GES that is greater than the average second composite GES indicates the subject that has been vaccinated with the candidate vaccine has protective immunity against the virus. In certain embodiments, the differentially expressed gene set comprises at least CREB5, DOCK5, ERMAP, IRAK3, OGFRL1, and RNF130. In certain embodiments, the method further comprises identifying the differentially expressed gene set. In certain embodiments, the method further comprises a step of adjusting treatment options for the subject based on the predicted effectiveness of the vaccine in the subject.

[0085] In various embodiments, disclosed herein is a method for predicting protective immunity against a virus in a subject that has been vaccinated with a vaccine, the method comprising detecting expression levels of multiple genes and/or gene products in a biological sample from the subject, wherein the multiple genes and/or gene products have been identified as a differentially expressed gene set associated with protective immunity against HIV or SIV and comprise at least 5, at least 6, at least 10, at least 20, at least 30, at least 40, at least 50, or 52 of the following genes: ALDOA, AOAH, AP2S1, APOBR, ARHGEF10L, ATF3, CD163, CEBPD, CLEC4A, CREB5, CSFIR, CSF3R, CST3, CTNNA1, DOCK5, DUSP6, EFHD2, ERMAP, FCGRT, GAA, GABARAPL1, GNAO, GRN, H2AFY, HBEGF, HSBP1, ICAM1, IRAK3, IL17RA, KIAA0513, KLF10, LST1, MAFB, MCL1, NAGA, NAMPT, NLRP3, OGFRL1, PSAP, PSTPIP1, RAB32, RGS10, RNF130, SIRPA, SLCO3A1, TBC1D8, TKT, TNFSF13, TRIB1, TYROBP, VIM, and WDFY3. The method further comprises calculating a first composite GES for the differentially expressed gene set in the biological sample from the subject, and calculating an average second composition GES for the differentially expressed gene set in a plurality of biological samples from subjects that have been vaccinated with the vaccine and are not immune to the virus, wherein a first composite GES that is greater than the average second composite GES indicates the subject that has been vaccinated with the candidate vaccine has protective immunity against the virus. In certain embodiments, the differentially expressed gene set comprises at least CREB5, DOCK5, ERMAP, IRAK3, OGFRL1, and RNF130. In certain embodiments, the method further comprises identifying the differentially expressed gene set. In certain embodiments, the method further comprises a step of adjusting treatment options for the subject based on whether the subject is indicated to have protective immunity against HIV or SIV.

[0086] In various embodiments, disclosed herein is a method for predicting effectiveness of a vaccine against HIV or SIV in a subject that has been vaccinated with the vaccine, the method comprising detecting expression levels of multiple genes and/or gene products in a biological sample from the subject, wherein the multiple genes and/or gene products have been identified as a differentially expressed gene set associated with efficacy of the vaccine and comprise at least 5, at least 10, at least 20, at least 30, at least 40, at least 50, at least 60, or 63 of the following genes: ADAM9, ALDH3B1, AMPD2, AP2S1, ARRB1, C5AR1, CAMKK2, CCR1, CD14, CD163, CD68, CEBPA, CSFIR, CST3, CTBP2, CTSD, DAPK1, DUSP6, FCGRT, FLVCR2, FZD1, GAA, GAS7, GRN, HMOX1, IL17RA, IMPA2, KIAA0513, LEPROT, LGALS2, LMNA, LRPAP1, MAFB, MPP1, MYOIF, NAGA, NPL, PGD, PKM2, PSAP, PTGER2, PXN, PYGL, QPCT, RAB20, RBM47, RNF130, SCARB2, SEMA4A, SERINC5, SIRPA, SIRPB1, SLC36A1, SLCO3A1, SORT1, SULT1A2, TBC1D8, TBX4S1, TLMP2, TKT, TYROBP, ZDHHC7, and ZNF467. The method further comprises calculating a first composite GES for the differentially expressed gene set in the biological sample from the subject, and calculating an average second composition GES for the differentially expressed gene set in a plurality of biological samples from subjects that have been vaccinated with the vaccine and are not immune to the virus, wherein a first composite GES that is greater than the average second composite GES indicates effectiveness of the vaccine. In certain embodiments, the differentially expressed gene set comprises at least SEMA4A, SLC36A1, SERINC5, IL17RA, CTSD, CD68, and GAA. In certain embodiments, the method further comprises identifying the differentially expressed gene set. In certain embodiments, the method further comprises a step of adjusting treatment options for the subject based on the predicted effectiveness of the vaccine in the subject.

[0087] In various embodiments, disclosed herein is a method for predicting protective immunity against a virus in a subject that has been vaccinated with a vaccine, the method comprising detecting expression levels of multiple genes and/or gene products in a biological sample from the subject, wherein the multiple genes and/or gene products have been identified as a differentially expressed gene set associated with protective immunity against HIV or SIV and comprise at least 5, at least 10, at least 20, at least 30, at least 40, at least 50, at least 60, or 63 of the following genes: ADAM9, ALDH3B1, AMPD2, AP2S1, ARRB1, C5AR1, CAMKK2, CCR1, CD14, CD163, CD68, CEBPA, CSFIR, CST3, CTBP2, CTSD, DAPK1, DUSP6, FCGRT, FLVCR2, FZD1, GAA, GAS7, GRN, HMOX1, IL17RA, IMPA2, KIAA0513, LEPROT, LGALS2, LMNA, LRPAP1, MAFB, MPP1, MYOIF, NAGA, NPL, PGD, PKM2, PSAP, PTGER2, PXN, PYGL, QPCT, RAB20, RBM47, RNF130, SCARB2, SEMA4A, SERINC5, SIRPA, SIRPB1, SLC36A1, SLCO3A1, SORT1, SULT1A2, TBC1D8, TBXAS1, TIMP2, TKT, TYROBP, ZDHHC7, and ZNF467. The method further comprises calculating a first composite GES for the differentially expressed gene set in the biological sample from the subject, and calculating an average second composition GES for the differentially expressed gene set in a plurality of biological samples from subjects that have been vaccinated with the vaccine and are not immune to the virus, wherein a first composite GES that is greater than the average second composite GES indicates the subject that has been vaccinated with the candidate vaccine has protective immunity against the virus. In certain embodiments, the differentially expressed gene set comprises at least SEMA4A, SLC36A1, SERINC5, IL17RA, CTSD, CD68, and GAA. In certain embodiments, the method further comprises identifying the differentially expressed gene set. In certain embodiments, the method further comprises a step of adjusting treatment options for the subject based on whether the subject is indicated to have protective immunity against HIV or SIV.

[0088] In certain embodiments, disclosed herein is a method for collecting data for evaluating protective immunity against a virus in a subject that has been vaccinated with a vaccine, the method comprising detecting expression of multiple genes and/or gene products in a biological sample from the subject, wherein the multiple genes and/or gene products have been identified as a differentially expressed gene set associated with protective immunity against HIV or SIV and comprise at least 3, at least 10, at least 15, at least 20, at least 25, at least 30, or 32 of the following genes: ACSL1, BHLHE40, CD4, CDC42EP3, CDC42EP4, CREB5, CREG1, DAPK1, DOCK5, EMILIN2, ERMAP, GAS7, GLA, IRAK3, LAMP2, LMNA, MGST2, NFIL3, NLRP3, OGFRL1, PHACTR2, RAB32, REEP4, RNF130, RRAGD, SDCBP, SIRPA, ST3GAL6, TKT, TNFRSF1B, TNFSF13, and VEGFA. The method further comprises calculating a first composite GES based on the expression levels of the genes, and calculating an average second composite GES based on expression levels of the genes in the differentially expressed gene set in a plurality of biological samples from subjects that have been vaccinated with the vaccine and are not immune to HIV or SIV. In certain embodiments, the differentially expressed gene set comprises at least BHLHE40, OGFRL1, and TNFSF13. In certain embodiments, the method further comprises identifying the differentially expressed gene set.

[0089] In certain embodiments, disclosed herein is a method for collecting data for evaluating protective immunity against a virus in a subject that has been vaccinated with a vaccine, the method comprising detecting expression of multiple genes in a biological sample from the subject, wherein the multiple genes have been identified as a differentially expressed gene set associated with protective immunity against HIV or SIV and comprise at least 5, at least 6, at least 10, at least 20, at least 30, at least 40, at least 50, at least 60, or 62 of the following genes: ACSL1, AHNAK, AOAH, ARHGEF10L, ARRB1, BHLHE40, CAMKK2, CD86, CD163, CDC42EP3, CEBPA, CEBPD, CLEC4A, CPD, CPPED1, CREB5, CREG1, CSF3R, CST1, CTNNA1, DAPK1, DOCK5, EMILIN2, ENO1, ERMAP, FAM105A, FBXL5, GLA, GNS, HBEGF, HEXB, HPSE, HSBP1, ID2, IRAK3, KIAA0513, LAMP2, LMNA, MAFB, MAPKAPK3, MICAL2, MYO1F, NFIL3, OGFRL1, PGD, PSAP, RAB27A, RNF130, RRAGD, RXRA, SCARB2, SDCBP, SEM44A, SLC31A2, SLC36A1, STX11, TBC1D8, TNFRSF1B, TNFSF13, VEGFA, VPS37C, and WDFY3. The method further comprises detecting expression of at least 5, at least 6, at least 10, at least 20, at least 30, at least 40, at least 50, at least 60, or 62 of the genes in the differentially expressed gene set in a biological sample from the subject; calculating a first composite GES based on the expression of the genes, and calculating an average second composite GES based on expression of the genes in the differentially expressed gene set in a plurality of biological samples from subjects that have been vaccinated with the vaccine and are not immune to HIV or SIV. In certain embodiments, the differentially expressed gene set comprises at least CREB5, DOCK5, ERMAP, IRAK3, OGFRL1, and RNF130. In certain embodiments, the method further comprises identifying the differentially expressed gene set.

[0090] In certain embodiments, disclosed herein is a method for collecting data for evaluating protective immunity against a virus in a subject that has been vaccinated with a vaccine, the method comprising detecting expression of multiple genes in a biological sample from the subject, wherein the multiple genes have been identified as a differentially expressed gene set associated with protective immunity against HIV or SIV and comprise at least 5, at least 6, at least 10, at least 20, at least 30, at least 40, at least 50, or 52 of the following genes: ALDOA, AOAH, AP2S1, APOBR, ARHGEF10L, ATF3, CD163, CEBPD, CLEC4A, CREB5, CSF1R, CSF3R, CST3, CTNNA1, DOCK5, DUSP6, EFHD2, ERMAP, FCGRT, GAA, GABARAPL1, GNAO, GRN, H2AFY, HBEGF, HSBPJ, ICAM1, IRAK3, IL17RA, KIAA0513, KLF10, LST1, MAFB, MCL1, NAGA, NAMPT, NLRP3, OGFRL1, PSAP, PSTPIP1, RAB32, RGS10, RNF130, SIRPA, SLCO3A1, TBC1D8, TKT, TNFSF13, TRIB1, TYROBP, VIM, and WDFY3. The method further comprises detecting expression of at least 5, at least 6, at least 10, at least 20, at least 30, at least 40, at least 50, or 52 of the genes in the differentially expressed gene set in a biological sample from the subject; calculating a first composite GES based on the expression of the genes, and calculating an average second composite GES based on expression of the genes in the differentially expressed gene set in a plurality of biological samples from subjects that have been vaccinated with the vaccine and are not immune to HIV or SIV. In certain embodiments, the differentially expressed gene set comprises at least CREB5, DOCK5, ERMAP, IRAK3, OGFRL1, and RNF130. In certain embodiments, the method further comprises identifying the differentially expressed gene set.

[0091] In certain embodiments of all aspects of the disclosure, gene set enrichment analysis (GSEA) may be used to identify classes of genes that may have an association with infection status post challenge. GSEA allows for the interpretation of gene expression data, focusing on gene sets, or groups of genes that share a common function, location, or regulation. Gene sets are available in a searchable format in the electronic Molecular Signatures Database (MSigDB). Genes from a sample may be ranked by differential gene expression, comparing protected to infected animals, and used to screen for enriched gene sets in the MSigDB. Normalized enrichment scores computed for each gene set may reflect the degree to which a gene set correlates with protection.

[0092] Differentially expressed gene sets may be sorted, for example, by functions such as apoptosis, differentiation, growth factor, metabolism, and cell signaling and proliferation. In a differentially expressed gene set disclosed herein, for example, DAPK1, EMILIN2, NFIL3, RNF130, and TNRSF1B may be associated with apoptosis. BHLHE40, CREG1, and ERMAP may be associated with differentiation. GAS7, OGFRL1, and VEGFA may be associated with growth factor. ACSL1, GLA, and TKT may be associated with metabolism. CD4, CDC42EP3, CDC42EP4, CREB5, DOCK5, IRAK3, LAMP2, LMNA, MGST2, NLRP3, PHACTR2, RAB32, REEP4, RRAGD, SDCBP, SIRPA, ST3GAL6, and TNFSF13 may be associated with cell signaling and/or proliferation.

[0093] In certain embodiments of all aspects of the disclosure, enrichment of a gene set may be greatest at a specific time point post-vaccination, such as, for example, one week, two weeks, one month, or two months post-vaccination. In certain embodiments of all aspects of the disclosure, enrichment of a gene set may still be present for a given period of time post-vaccination, such as, for example, 2 months, 4 months, 6 months, 1 year, 2 years, 5 years, 10 years post-vaccination or for the remainder of the lifetime of the vaccinated subject.

[0094] The differentially expressed gene sets disclosed herein may be associated with other immune responses in addition to the GES. Other immune responses that be associated with the differentially expressed gene sets include, for example, higher levels of antibody-dependent cellular phagocytosis (ADCP), antibody-dependent complement deposition (ADCD), antibody-dependent cellular cytotoxicity (ADCC), antibody Fc polyfunctionality, IgG breadth, tier 1 Nab titers, percent tier 2 neutralization, and pol-specific cells, as well as increased cellular responses to Gag, gp140, CD107a, interferon-γ, and chemokine CCL4.

[0095] As discussed above, in certain exemplary embodiments of all aspects of the disclosure, a differentially expressed gene set may comprise at least BHLHE40, OGFRL1, and TNFSF13. BHLHE40 has been shown to suppress IL10; OGFRL1 is a paralog gene for the opioid growth factor, and TNFSF13 belongs to the tumor necrosis factor ligand super family. TNFSF13 is also known as APRIL (a proliferation-inducing ligand) and is a ligand for TNFRSF17/BCMA or TNFSF13B/TACI, both of which are involved in numerous B-cell functions including class switching, affinity maturation, and antibody production. TNFRSF17 expression has been shown to correlate with increased magnitude of vaccine-induced antibody titers against influenza and yellow fever. TNFSF13 is generally produced by innate immune cells, but can also be induced in activated B cells. DNA vaccines encoding TNFSF13 as a molecular adjuvant elicit antibody production with increased HIV-1 neutralization activity. TNFSF13 also increases the longevity of humoral immunity and protection to influenza virus infection.

[0096] Methods of Vaccination

[0097] Another aspect is directed to methods of vaccinating a subject with a vaccine. For example, a method of a vaccinating a subject with an HIV or SIV vaccine is provided, the method comprising administering the HIV or SIV vaccine to the subject, wherein prior to the administering step, the subject has been identified as having protective immunity against HIV or SIV using the methods or predicting protective immunity disclosed herein. Also provided is a method of a vaccinating a subject with an HIV or SIV vaccine, the method comprising administering the HIV or SIV vaccine to the subject, wherein prior to the administering step, the vaccine has been identified as an effective vaccine in the subject using the methods of predicting vaccine effectiveness disclosed herein.

[0098] Detecting Gene Expression

[0099] As used herein, measuring or detecting the expression of genes or nucleic acids comprises measuring or detecting any nucleic acid transcript (e.g., mRNA or cDNA) corresponding to the gene of interest or the protein encoded thereby. The presence or absence of a gene may be detected by measuring or detecting the expression of a gene or nucleic acids, for example if the gene or nucleic acids are not detected, or if the measurement of the expression of the gene or nucleic acid falls below a threshold level, the gene or nucleic acids may be determined to be absent. Likewise, if the gene or nucleic acids are detected, or if the measurement of the expression of the gene or nucleic acid falls above a threshold level, the gene or nucleic acids may be determined to be present. If a gene is associated with more than one mRNA transcript or isoform, the expression of the gene can be measured or detected by measuring or detecting one or more of the mRNA transcripts of the gene, or all of the mRNA transcripts associated with the gene.

[0100] Typically, gene expression can be detected or measured on the basis of mRNA or cDNA levels, although protein levels also can be used when appropriate. Any quantitative or qualitative method for measuring mRNA levels, cDNA, or protein levels can be used. Suitable methods of detecting or measuring mRNA or cDNA levels include, for example, Northern Blotting, microarray analysis, RNA-sequencing, or a nucleic acid amplification procedure, such as reverse-transcription PCR (RT-PCR) or real-time RT-PCR, also known as quantitative RT-PCR (qRT-PCR). Such methods are well known in the art. See e.g., Sambrook et al., Molecular Cloning: A Laboratory Manual. 4^{th} Ed., Cold Spring Harbor Press, Cold Spring Harbor, N.Y., 2012. Other techniques include digital, multiplexed analysis of gene expression, such as the nCounter® (NanoString Technologies, Seattle, Wash.) gene expression assays, which are further described in US20100112710 and US20100047924.

[0101] Detecting a nucleic acid of interest generally involves hybridization between a target (e.g., mRNA, cDNA, or genomic DNA) and a probe. The nucleic acid sequences of the genes described herein are known. Therefore, one of skill in the art can readily design hybridization probes for detecting those genes. See, e.g. Sambrook et al., Molecular Cloning: A Laboratory Manual, 4^{th} Ed., Cold Spring Harbor Press, Cold Spring Harbor, N.Y., 2012, For example, polynucleotide probes that specifically bind to the mRNA transcripts of the genes described herein (or cDNA synthesized therefrom) can be created using the nucleic acid sequences of the mRNA or cDNA targets themselves by routine techniques (e.g., PCR or synthesis). As used herein, the term “fragment” means a part or portion of a polynucleotide sequence comprising about 10 or more contiguous nucleotides, about 15 or more contiguous nucleotides, about 20 or more contiguous nucleotides, about 30 or more, or even about 50 or more contiguous nucleotides. In certain embodiments, the polynucleotide probes will comprise 10 or more nucleic acids, 20 or more, 50 or more, or 100 or more nucleic acids. In order to confer sufficient specificity, the probe may have a sequence identity to a complement of the target sequence of about 90% or more, such as about 95% or more (e.g., about 98% or more or about 99% or more) as determined, for example, using the well-known Basic Local Alignment Search Tool (BLAST) algorithm (available through the National Center for Biotechnology Information (NCBI), Bethesda, Md.).

[0102] Each probe may be substantially specific for its target, to avoid any cross-hybridization and false positives. An alternative to using specific probes is to use specific reagents when deriving materials from transcripts (e.g., during cDNA production, or using target-specific primers during amplification). In both cases specificity can be achieved by hybridization to portions of the targets that are substantially unique within the group of genes being analyzed, for example hybridization to the polyA tail would not provide specificity. If a target has multiple splice variants, it is possible to design a hybridization reagent that recognizes a region common to each variant and/or to use more than one reagent, each of which may recognize one or more variants.

[0103] Stringency of hybridization reactions is readily determinable by one of ordinary skill in the art, and generally is an empirical calculation dependent upon probe length, washing temperature, and salt concentration. In general, longer probes may require higher temperatures for proper annealing, while shorter probes may require lower temperatures. Hybridization generally depends on the ability of denatured nucleic acid sequences to reanneal when complementary strands are present in an environment below their melting temperature. The higher the degree of desired homology between the probe and hybridizable sequence, the higher the relative temperature that can be used. As a result, it follows that higher relative temperatures would tend to make the reaction conditions more stringent, while lower temperatures less so.

[0104] In some embodiments of all aspects of the disclosure, RNA-sequencing (RNA-seq) is used. As used herein, RNA-seq, also called Whole Transcriptome Shotgun Sequencing, refers to any of a variety of high-throughput sequencing techniques used to detect the presence and quantity of RNA transcripts in real time. See Wang, Z., M. Gerstein, and M. Snyder, RNA-Seq: a revolutionary tool for transcriptomics, NAT REV GENET, 2009. 10(1): p. 57-63. RNA-seq can be used to reveal a snapshot of a sample's RNA from a genome at a given moment in time. In certain embodiments of all aspects of the disclosure, RNA is converted to cDNA fragments via reverse transcription prior to sequencing, and, in certain embodiments, RNA can be directly sequenced from RNA fragments without conversion to cDNA. Adaptors may be attached to the 5′- and/or 3′-ends of the fragments, and the RNA or cDNA may optionally be amplified, for example by PCR. The fragments are then sequenced using high-throughput sequencing technology, such as, for example, those available from Roche (e.g., the 454 platform), Illumina, Inc., and Applied Biosystem (e.g., the SOLiD system).

[0105] In some embodiments of all aspects of the disclosure, microarray analysis or a PCR-based method is used. In this respect, measuring the expression of nucleic acids in a biological sample can comprise, for instance, contacting a sample, such as a sample comprising lymphocytes, with polynucleotide probes specific to the genes of interest, or with primers designed to amplify a portion of the genes of interest, and detecting binding of the probes to the nucleic acid targets or amplification of the nucleic acids, respectively. Detailed protocols for designing PCR primers are known in the art. See e.g., Sambrook et al., Molecular Cloning: A Laboratory Manual, 4^{th} Ed., Cold Spring Harbor Press, Cold Spring Harbor, N.Y., 2012. Similarly, detailed protocols for preparing and using microarrays to analyze gene expression are known in the art and described herein.

[0106] Alternatively or additionally, expression levels of genes can be determined at the protein level, meaning that levels of proteins encoded by the genes discussed herein are measured. Several methods and devices are known for determining levels of proteins including immunoassays, such as described, for example, in U.S. Pat. Nos. 6,143,576; 6,113,855; 6,019,944; 5,985,579; 5,947,124; 5,939,272; 5,922,615; 5,885,527; 5,851,776; 5,824,799; 5,679,526; 5,525,524; 5,458,852; and 5,480,792, each of which is hereby incorporated by reference in its entirety. These assays may include various sandwich, competitive, or non-competitive assay formats, to generate a signal that is related to the presence or amount of a protein of interest. Any suitable immunoassay may be utilized, for example, lateral flow, enzyme-linked immunoassays (ELISA), radioimmunoassays (RIAs), competitive binding assays, and the like. Numerous formats for antibody arrays have been described. Such arrays may include different antibodies having specificity for different proteins intended to be detected. For example, at least 100 different antibodies are used to detect 100 different protein targets, each antibody being specific for one target. Other ligands having specificity for a particular protein target can also be used, such as the synthetic antibodies disclosed in WO 2008/048970, which is hereby incorporated by reference in its entirety. Other compounds with a desired binding specificity can be selected from random libraries of peptides or small molecules. U.S. Pat. No. 5,922,615, which is hereby incorporated by reference in its entirety, describes a device that uses multiple discrete zones of immobilized antibodies on membranes to detect multiple target antigens in an array. Microtiter plates or automation can be used to facilitate detection of large numbers of different proteins.

[0107] Samples

[0108] The methods described herein involve analysis of gene expression profiles in biological samples obtained from subjects, such as subjects who have been previously vaccinated with a vaccine or candidate vaccine, subjects who are known to be immune to a virus of interest, subjects who may be at an increased risk of virus acquisition, and subjects who are not infected with HIV or SIV. In certain embodiments of all aspects of the disclosure, the sample may comprise blood and blood cells. In certain embodiments of all aspects of the disclosure, the sample may comprise cells from a blood sample. In certain embodiments of all aspects of the disclosure, the sample comprises peripheral blood mononuclear cells, such as, for example, lymphocytes and/or myeloid cells. Nucleic acids or polypeptides may be isolated from the sample prior to detecting gene expression. In one embodiment of all aspects of the disclosure, the biological sample comprises a blood sample. The methods disclosed herein can be used with biological samples collected from a variety of mammals, such as human and non-human primates, and in certain embodiments, the methods disclosed herein may be used with biological samples obtained from a human subject. In certain embodiments of all aspects of the disclosure, the samples may be cryopreserved prior to detecting gene expression.

[0109] Controls

[0110] In certain embodiments of all aspects of the disclosure, the control may be any suitable reference that allows evaluation of the expression level of the genes in the biological sample as compared to the expression of the same genes in a sample comprising control cells. In certain embodiments of all aspects of the disclosure, the control cells may be cells from a subject or subjects that have not been vaccinated with the vaccine or candidate vaccine, and in certain embodiments, the control cells may be cells from a subject or subjects that are known not to have been exposed to a particular virus, such as HIV or SIV. The control can be a sample that is analyzed simultaneously or sequentially with the test sample. In certain embodiments of all aspects of the disclosure, the control can be the average expression level of the genes of interest in a pool of samples from subjects known to have not been vaccinated and/or exposed to the virus. In certain embodiments of all aspects of the disclosure, the control can be embodied, for example, in a pre-prepared microarray used as a standard or reference, or in data that reflects the expression profile of relevant genes in a sample or pool of samples from subjects known to have not been vaccinated and/or exposed to the virus, such as might be part of an electronic database or computer program.

[0111] Overexpression and decreased expression (under-expression) of a gene can be determined by any suitable method, such as by comparing the expression of the genes in a test sample with a control gene or threshold value. In certain embodiments of all aspects of the disclosure, the control gene is one or more housekeeping genes, such as ACTB, GAPDH, HMBS, GUSB, or RPLPO, that can be used to normalize gene expression levels. Regardless of the method used, overexpression and under-expression can be defined as any level of expression greater than or less than the level of expression of a control gene or threshold value, such as the normalized gene expression value. By way of further illustration, overexpression can be defined as expression that is at least about 1.2-fold, 1.5-fold, 2-fold, 2.5-fold, 4-fold, 5-fold, 10-fold, 20-fold, 50-fold, 100-fold higher or even greater expression as compared to tissue control gene or threshold value, and under-expression can similarly be defined as expression that is at least about 1.2-fold, 1.5-fold, 2-fold, 2.5-fold, 4-fold, 5-fold, 10-fold, 20-fold, 50-fold, 100-fold lower or even lower expression as compared to tissue control gene or threshold value.

[0112] Arrays

[0113] A convenient way of measuring RNA transcript levels for multiple genes in parallel is to use an array (also referred to as microarrays in the art). A useful array may include multiple polynucleotide probes (such as DNA) that are immobilized on a solid substrate (e.g., a glass support such as a microscope slide, or a membrane) in separate locations (e.g., addressable elements) such that detectable hybridization can occur between the probes and the transcripts to indicate the amount of each transcript that is present. The arrays disclosed herein can be used in methods of detecting the expression of a desired combination of genes, which combinations are discussed herein.

[0114] In one embodiment of all aspects of the disclosure, the array comprises (a) a substrate and (b) at least 3, such as at least 5, at least 8, at least 10, at least 15, at least 20, at least 25, at least 30, or 32 different addressable elements that each comprise at least one polynucleotide probe for detecting the expression of an mRNA transcript (or cDNA synthesized from the mRNA transcript) that is specific for one of the genes in the gene signature, such that the array can be used to simultaneously detect the expression of these at least 3, at least 5, at least 8, at least 10, at least 15, at least 20, at least 25, at least 30, or 32 genes.

[0115] In certain embodiments of all aspects of the disclosure, the array further comprises one or more different addressable elements comprising at least one oligonucleotide probe for detecting the expression of an mRNA transcript (or cDNA synthesized from the mRNA transcript) of a control gene.

[0116] As used herein, the term “addressable element” means an element that is attached to the substrate at a predetermined position and specifically binds a known target molecule, such that when target-binding is detected (e.g., by fluorescent labeling), information regarding the identity of the bound molecule is provided on the basis of the location of the element on the substrate. Addressable elements are “different” for the purposes of the present disclosure if they do not bind to the same target gene. The addressable element comprises one or more polynucleotide probes specific for an mRNA transcript of a given gene, or a cDNA synthesized from the mRNA transcript. The addressable element can comprise more than one copy of a polynucleotide or can comprise more than one different polynucleotide, provided that all of the polynucleotides bind the same target molecule. Where a gene is known to express more than one mRNA transcript, the addressable element for the gene can comprise different probes for different transcripts, or probes designed to detect a nucleic acid sequence common to two or more (or all) of the transcripts. Alternatively, the array can comprise an addressable element for the different transcripts. The addressable element also can comprise a detectable label, suitable examples of which are well known in the art.

[0117] The array can comprise addressable elements that bind to mRNA or cDNA other than that of the genes in the gene signature. However, an array capable of detecting a vast number of targets (e.g., mRNA or polypeptide targets), such as arrays designed for comprehensive expression profiling of a cell line, chromosome, genome, or the like, may not be economical or convenient for collecting data to use in diagnosing and/or prognosing cancer. Thus, the array typically comprises no more than about 1000 different addressable elements, such as no more than about 500 different addressable elements, no more than about 250 different addressable elements, or even no more than about 100 different addressable elements, such as about 75 or fewer different addressable elements, about 62 or fewer different addressable elements, about 60 or fewer different addressable elements, about 52 or fewer different addressable elements, about 50 or fewer different addressable elements, about 40 or fewer different addressable elements, about 32 or fewer different addressable elements, about 30 or fewer different addressable elements, about 20 or fewer different addressable elements, about 15 or fewer, about 10 or fewer, about 8 or fewer, about 6 or fewer, about 5 or fewer, or about 3 different addressable elements.

[0118] It is also possible to distinguish these diagnostic arrays from the more comprehensive genomic arrays and the like by limiting the number of polynucleotide probes on the array. For example, the array may have polynucleotide probes for no more than 1000 genes immobilized on the substrate. In other embodiments, the array has oligonucleotide probes for no more than 500, no more than 250, no more than 100, no more than 75, no more than 60, or no more than 50 genes. In certain embodiments, the array has oligonucleotide probes for no more than 40 genes, and in certain embodiments, the array has oligonucleotide probes for no more than 30 genes, no more than 20 genes, or no more than 15 genes.

[0119] The substrate can be any rigid or semi-rigid support to which polynucleotides can be covalently or non-covalently attached. Suitable substrates include membranes, filters, chips, slides, wafers, fibers, beads, gels, capillaries, plates, polymers, microparticles, and the like. Materials that are suitable for substrates include, for example, nylon, glass, ceramic, plastic, silica, aluminosilicates, borosilicates, metal oxides such as alumina and nickel oxide, various clays, nitrocellulose, and the like.

[0120] The polynucleotides of the addressable elements (also referred to as “probes”) can be attached to the substrate in a pre-determined 1- or 2-dimensional arrangement, such that the pattern of hybridization or binding to a probe is easily correlated with the expression of a particular gene. Because the probes are located at specified locations on the substrate (i.e., the elements are “addressable”), the hybridization or binding patterns and intensities create a unique expression profile, which can be interpreted in terms of expression levels of particular genes and can be correlated with vaccine efficacy in accordance with the methods described herein.

[0121] The array can comprise other elements common to polynucleotide arrays. For instance, the array also can include one or more elements that serve as a control, standard, or reference molecule, such as a housekeeping gene or portion thereof, to assist in the normalization of expression levels or the determination of nucleic acid quality and binding characteristics, reagent quality and effectiveness, hybridization success, analysis thresholds and success, etc. These other common aspects of the arrays or the addressable elements, as well as methods for constructing and using arrays, including generating, labeling, and attaching suitable probes to the substrate, consistent with the invention are well-known in the art. Other aspects of the array are as described with respect to the methods disclosed herein.

[0122] An array can also be used to measure protein levels of multiple proteins in parallel. Such an array comprises one or more supports bearing a plurality of ligands that specifically bind to a plurality of proteins, wherein the plurality of proteins comprises no more than 500, no more than 250, no more than 100, no more than 75, no more than 62, no more than 60, no more than 52, no more than 50, no more than 40, no more than 32, no more than 30, no more than 20, no more than 15, no more than 10, no more than 8, no more than 6, no more than 5, or no more than 3 different proteins. The ligands are optionally attached to a planar support or beads. In one embodiment, the ligands are antibodies. The proteins that are to be detected using the array correspond to the proteins encoded by the nucleic acids of interest, as described above, including the specific gene expression profiles disclosed. Thus, each ligand (e.g. antibody) is designed to bind to one of the target proteins (e.g., polypeptide sequences encoded by the genes disclosed herein). As with the nucleic acid arrays, each ligand may be associated with a different addressable element to facilitate detection of the different proteins in a sample.

[0123] In certain embodiments of all aspects of the disclosure, disclosed herein are methods of obtaining a gene expression profile in a biological sample, such as a blood sample, the method comprising: a) incubating an array as disclosed herein with the biological sample; and b) measuring the expression level of the genes of interest.

[0124] Compositions and Kits

[0125] The polynucleotide probes and/or primers or antibodies or polypeptide probes that can be used in the methods described herein can be assembled into kits. Thus, one embodiment is directed to a kit for evaluating efficacy and/or effectiveness of an HIV or an SIV vaccine. In some aspects, a kit is disclosed for predicting protective immunity for subjects following HIV or SIV vaccination, or a kit for collecting data for evaluating such protective immunity.

[0126] In certain embodiments of all aspects of the disclosure, provided herein is a kit for measuring expression levels of a plurality of genes comprising a plurality of polynucleotide probes for detecting at least 3, such as at least 5, 6, at least 8, at least 10, at least 15, at least 20, at least 25, at least 30, 32, at least 40, at least 50, 52, at least 60, 62, or 63 genes in a gene signature, wherein the plurality of probes contains polynucleotide probes for no more than 500, 250, 100, 75, 60, 50, 40, 30, 25, 20, 15, 10, 8, or 5 genes. In one embodiment, the kit comprises at least one oligonucleotide probe for detecting the expression of a control gene. All of the polynucleotide probes described herein may be optionally labeled. Such labeled polynucleotide probes are not naturally occurring.

[0127] In some embodiments of all aspects of the disclosure, the kit may optionally include polynucleotide primers for amplifying a portion of the mRNA transcripts from at least 3, at least 5, at least 6, at least 10, at least 15, at least 20, at least 25, at least 30, at least 32, at least 40, at least 50, at least 52, at least 60, at least 62, or at least 63 of the genes in the gene signature.

[0128] In certain embodiments of all aspects of the disclosure, disclosed herein is a kit for measuring expression levels of a plurality of genes, the kit comprising a plurality of probes for detecting at least 3, at least 5, at least 8, at least 10, at least 15, at least 20, at least 25, at least 30, or 32 of the following genes: ACSL1, BHLHE40, CD4, CDC42EP3, CDC42EP4, CREB5, CREG1, DAPK1, DOCK5, EMILIN2, ERMAP, GAS7, GLA, IRAK3, LAMP2, LMNA, MGST2, NFIL3, NLRP3, OGFRL1, PHACTR2, RAB32, REEP4, RNF130, RRAGD, SDCBP, SIRPA, ST3GAL6, TKT, TNFRSF1B, TNFSF13, and VEGFA, wherein the plurality of probes contains probes for detecting no more than 500 different genes. In certain embodiments, the kit comprises a plurality of probes for detecting at least BHLHE40, OGFRL1, and TNFSF13. In certain embodiments, the plurality of probes contains probes for detecting no more than 250, 100, 75, 60, 50, 40, 32, 30, 25, 20, 15, 10, 8, or 3 different genes.

[0129] In certain embodiments of all aspects of the disclosure, disclosed herein is a kit for measuring expression of a plurality of genes, the kit comprising a plurality of probes for detecting at least 5, at least 6, at least 10, at least 20, at least 30, at least 40, at least 50, at least 60, or 62 of the following genes: ACSL1, AHNAK, AOAH, ARHGEF10L, ARRB1, BHLHE40, CAMKK2, CD86, CD163, CDC42EP3, CEBPA, CEBPD, CLEC4A, CPD, CPPED1, CREB5, CREG1, CSF3R, CST1, CTNNA1, DAPK1, DOCK5, EMILIN2, ENO1, ERMAP, FAM105A, FBXL5, GLA, GNS, HBEGF, HEXB, HPSE, HSBP1, ID2, IRAK3, KIAA0513, LAMP2, LMNA, MAFB, MAPKAPK3, MICAL2, MYOIF, NFIL3, OGFRL1, PGD, PSAP, RAB27A, RNF130, RRAGD, RXRA, SCARB2, SDCBP, SEMA4A, SLC31A2, SLC36AJ, STX11, TBC1D8, TNFRSF1B, TNFSF13, VEGFA, VPS37C, and WDFY3, wherein the plurality of probes contains probes for detecting no more than 500 different genes. In certain embodiments, the kit comprises a plurality of probes for detecting at least CREB5, DOCK5, ERMAP, IRAK3, OGFRL1, and RNF130. In certain embodiments, the plurality of probes contains probes for detecting no more than 250, 100, 75, 62, 60, 50, 40, 30, 25, 20, 15, 10, 8, 6, or 5 different genes.

[0130] In certain embodiments of all aspects of the disclosure, disclosed herein is a kit for measuring expression levels of a plurality of genes, the kit comprising a plurality of probes for detecting at least 5, at least 6, at least 10, at least 20, at least 30, at least 40, at least 50, or 52 of the following genes: ALDOA, AOAH, AP2S, APOBR, ARHGEF10L, ATF3, CD163, CEBPD, CLEC4A, CREB5, CSF1R, CSF3R, CST3, CTNNA1, DOCK5, DUSP6, EFHD2, ERMAP, FCGRT, GAA, GABARAPL1, GNAO, GRN, H2AFY, HBEGF, HSBP1, ICAM1, IRAK3, IL17RA, KIAA0513, KLF10, LST1, MAFB, MCL1, NAGA, NAMPT, NLRP3, OGFRL1, PSAP, PSTPIP1, RAB32, RGS10, RNF130, SIRPA, SLCO3A1, TBC1D8, TKT, TNFSF13, TRIB1, TYROBP, VIM and WDFY3, wherein the plurality of probes contains probes for detecting no more than 500 different genes. In certain embodiments, the kit comprises a plurality of probes for detecting at least CREB5, DOCK5, ERMAP, IRAK3, OGFRL1, and RNF130. In certain embodiments, the plurality of probes contains probes for detecting no more than 250, 100, 75, 60, 52, 50, 40, 30, 25, 20, 15, 10, 8, 6, or 5 different genes.

[0131] In certain embodiments of all aspects of the disclosure, disclosed herein is a kit for measuring expression levels of a plurality of genes, the kit comprising a plurality of probes for detecting at least 5, at least 6, at least 10, at least 20, at least 30, at least 40, at least 50, at least 60, or 63 of the following genes: ADAM9, ALDH3B1, AMPD2, AP2S1, ARRB1, C5AR1, CAMKK2, CCR1, CD14, CD163, CD68, CEBPA, CSFIR, CST3, CTBP2, CTSD, DAPK1, DUSP6, FCGRT, FLVCR2, FZDJ, GAA, GAS7, GRN, HMOX1, IL17RA, IMPA2, KIAA0513, LEPROT, LGALS2, LMNA, LRPAP1, MAFB, MPP1, MYO1F, NAGA, NPL, PGD, PKM2, PSAP, PTGER2, PXN, PYGL, QPCT, RAB20, RBM47, RNF130, SCARB2, SEMA4A, SERINC5, SIRPA, SIRPB1, SLC36A1, SLCO3A1, SORT1, SULT1A2, TBC1D8, TBXAS1, TMP2, TKT, TYROBP, ZDHHC7, and ZNF467, wherein the plurality of probes contains probes for detecting no more than 500 different genes. In certain embodiments, the kit comprises a plurality of probes for detecting at least SEMA4A, SLC36A1, SERINC5, IL17RA, CTSD, CD68, and GAA. In certain embodiments, the plurality of probes contains probes for detecting no more than 250, 100, 75, 63, 60, 50, 40, 30, 25, 20, 15, 10, 8, 6, or 5 different genes.

[0132] The kit for measuring expression of a plurality of genes may also comprise antibodies. For example, the kit may comprise a plurality of antibodies for detecting at least 3, at least 5, at least 6, at least 8, at least 10, at least 15, at least 20, at least 25, at least 30, at least 32, at least 40, at least 50, at least 52, at least 60, at least 62, or 63 of the polypeptides encoded by genes in the gene signature, wherein the plurality of antibodies contains antibodies for no more than 500, 250, 100, 75, 63, 62, 60, 52, 50, 40, 32, 30, 25, 20, 15, 10, 8, 6, 5, or 3 polypeptides.

[0133] As noted above, the polynucleotide or polypeptide probes and antibodies described herein may be optionally labeled with a detectable label. Any detectable label used in conjunction with probe or antibody technology, as known by one of ordinary skill in the art, can be used. As described herein, the labelled polynucleotide probes or labelled antibodies are not naturally occurring molecules; that is the combination of the polynucleotide probe coupled to the label or the antibody coupled to the label do not exist in nature. In certain embodiments, the probe or antibody is labeled with a detectable label selected from the group consisting of a fluorescent label, a chemiluminescent label, a quencher, a radioactive label, biotin, mass tags and/or gold.

[0134] In one embodiment, a kit includes instructional materials disclosing methods of use of the kit contents in a disclosed method. The instructional materials may be provided in any number of forms, including, but not limited to, written form (e.g., hardcopy paper, etc.), in an electronic form (e.g., computer diskette or compact disk) or may be visual (e.g., video files). The kits may also include additional components to facilitate the particular application for which the kit is designed. Thus, for example, the kits may additionally include other reagents routinely used for the practice of a particular method, including, but not limited to buffers, enzymes, labeling compounds, and the like. Such kits and appropriate contents are well known to those of skill in the art. The kit can also include a reference or control sample. The reference or control sample can be a biological sample or a data base.

[0135] Unless otherwise defined, all technical and scientific terms used herein have the same meaning as commonly understood by one of ordinary skill in the art. Although methods and materials similar or equivalent to those described herein can be used in the practice or testing of the present invention, suitable methods and materials are described below. All publications, patent applications, patents, and other references mentioned herein are incorporated by reference in their entirety. In case of conflict, the present specification, including definitions, will control. In addition, the materials, methods, and examples are illustrative only and not intended to be limiting.

### EXAMPLES

[0136] Unless indicated otherwise in these Examples, the methods involving commercial kits were done following the instructions of the manufacturers.

### Example 1. Differentially Expressed Gene Sets and Gene Expression Scores

[0137] Samples

[0138] Whole transcriptome profiling of bulk sorted lymphocytes isolated from peripheral blood of 21 rhesus monkeys from the Ad26/gp140 arm of the SIV (Barouch I) and SHIV (Barouch II) challenge preclinical trials was performed by next-generation sequencing (NGS) of RNA. Total RNA was extracted from four sorted lymphocyte populations of CD4 T cells, CD8 T cells, NK cells and B cells. RNA-Seq data was generated from time points post vaccination but prior to challenge in the Ad26/gp140 arm from both NHP studies.

[0139] Cryopreserved peripheral blood mononuclear cells (PBMCs) from 10 rhesus monkeys from the Barouch I study were obtained. Likewise, PBMCs from 32 rhesus monkeys from the Barouch II study were obtained. Monkeys were selected from the vaccine arms of those studies where partial efficacy was observed, namely the Ad26/gp140 arm of the Barouch I SIV challenge study (N=10) and the Ad26/gp140 (N=11), Ad26/Ad26+gp140 (N=12) and Ad26/MVA+gp140 (N=9) arms of the Barouch II SHIV study.

[0140] Antibody-Dependent Cellular Phagocytosis (ADCP) Assay

[0141] A THP-1 phagocytosis assay was performed. THP-1 cells were purchased from ATCC and cultured as recommended. Recombinant vaccine matched gp140 (32H) was used to saturate the binding sites on 1 μm fluorescent neutravidin beads (Invitrogen) overnight at 4° C. Excess antigen was removed by washing the pelleted beads, which were then incubated with patient antibody samples for 2 hours at 37° C. Following opsonization, THP-1 cells were added, and the cells were incubated overnight to allow phagocytosis. The cells were then fixed, and bead uptake was measured via flow cytometry on a BD FACScan equipped with high-throughput sampler. Phagocytic scores represent iMFI values (integrated MFI: frequency×MFI). Each antibody sample was tested over a range of concentrations (0.1-100 μg/ml).

[0142] ADCP was measured as described in Ackerman et al., A robust, high-throughput assay to determine the phagocytic activity of clinical antibody samples, J Immunol Methods 2011; 366, 8-19. Briefly, gp120 CRFO1_AE (CM235, Immune Technology, NY, USA) was biotinylated at a biotin to antigen ratio of 50 following manufacturer's instructions (Thermo Scientific), and excess biotin was removed using Zeba desalting columns (Thermo Scientific). Biotinylated antigen was then incubated with yellow-green strepavidin-fluorescent beads (Molecular Probes) for 2 h at 37° C. 10 μl of a 100-fold dilution of beads-antigen was incubated 2 h at 37° C. with 100 μl of a 200-fold dilution of plasma samples before addition of 20,000 THP-1 cells per well (MilliporeSigma, Burlington, Mass., USA). For negative control, beads-antigen were incubated with plasma samples from HIV-uninfected subjects. After 18 h incubation at 37° C., the cells were fixed with 2% formaldehyde solution (Tousimis, Rockville Md. USA) and fluorescence was evaluated on a LSRII (BD Bioscience). The phagocytic score was calculated by multiplying the percentage of bead-positive cells by the geo mean fluorescence intensity of the bead-positive cells and dividing by 10⁴.

[0143] Flow Cytometry

[0144] Cells were thawed and stained with a cocktail of antibodies including CD3 Alexa Fluor 700 (clone SP34-2), CD4 Brilliant Violet 605 (clone OKT4), CD8 Brilliant Violet 785 (clone RPA-T8), CD14 Pacific Blue (clone M5E2), CD16 PE-Cy7 (clone 3G8), CD20 FITC (clone 2H7), NKG2A PE (clone Z199), and Live/Dead Aqua viability dye to differentiate lymphocyte populations. The stained cells were analyzed and sorted using a BD FACS Aria II, producing pure bulk populations of CD4+ T cells, CD8+ T cells, NK cells, and B cells.

[0145] RNA Extraction and Sequencing

[0146] Total RNA was extracted from sorted lymphocytes in a two-step approach using the Single Cell RNA Purification kit (Norgen Biotek Corp, Ontario, Canada). Post-sorted cells were immediately pelleted, lysed, and stored in lysis solution at −80° C. The extraction process was continued per manufacturer's instructions after thawing and ethanol addition. RNA integrity number (RIN) scores and concentrations of the purified RNA were determined with the RNA 6000 Pico kit and the 2100 Bioanalyzer (both Agilent, Santa Clara, Calif.). Next Generation Sequencing (NGS) RNA-Seq was performed using SMART-Seq® technology. RNA fragmentation, first-strand cDNA synthesis, sample-specific adaptor/index addition, nbosomal cDNA depletion, and fragment amplification were performed in 96-well plates with 2.5 ng RNA inputs using the SMARTer Stranded Total RNA-Seq Pico Input Mammalian kit (Takara Bio Inc, Kusatsu, Japan) per manufacturer's instructions, but with spike-ins of exogenous control RNA (ERCC ExFold RNA Spike-in Mixes 1 or 2; ThermoFisher Scientific, Waltham, Mass.). ERCC was added to each sample to a final dilution of 1:260,000 in the initial 13 μl volume set-up of the SMARTer kit. Final library PCR amplifications were 13 cycles.

[0147] Quantitation of amplified cDNA libraries was performed by NGS-based MiSeq quantitation. Initial concentrations for each sample library were determined using the Qubit® dsDNA HS kit with the Qubit® Fluorometer (both ThermoFisher Scientific), while QC confirmations and fragment sizes of random samples were determined with the High Sensitivity DNA chip (Agilent). A portion of each sample was diluted to 2 nM in Resuspension Buffer prior to pooling 3 μl of each dilution into a collective sample pool. This pool was sequenced to determine the percent of total reads assigned to each sample, using a 50 cycle MiSeq® Reagent Kit v2 and MiSeq® instrument (both Illumina; San Diego, Calif.) per manufacturer's instructions for single-read output, with final input concentrations of 8 pM, and no PhiX. After analyzing the percent of total reads assigned to each sample, 2 nM sample dilutions were made from the original sample plate using different volumes as necessary to adjust for any deviations from the expected read percentage.

[0148] NGS was performed on pooled fractions with either HiSeq® 2500 (with TruSeq® PE Cluster cBot v3, and 200-cycle TruSeq® SBS v3 kits), or NextSeq® (with the 300-cycle NextSeq® 500 High Output v2 kit) instruments (all Illumina) per manufacturer's instructions for paired-end output targeting 50 Million reads per sample. For the HiSeq® approach, 8.5 pM of the diluted denatured cDNA from the pooled product spiked with 1% PhiX was loaded into flow cells. Starting input for the NextSeq® approach was 30 μl of a 150 pM dilution of the pooled product, followed by denaturation, neutralization, dilution, 1% PhiX spike-in, and loading.

[0149] Sequence Alignment and Expression Analysis

[0150] Paired-End (PE) sequencing data generated from Illumina HiSeq® and NextSeq® was converted to fastq, and adapters masked using bcl2fastq v2.17.1.14 software (Illumina). The raw fastq files were examined for quality using FastQC v0.11.5, and reads with quality scores (Q) of <30 were removed using Trimmomatic v0.36. Reads passing filter and with minimum length of 50 base pairs were retained. Reads passing filter were aligned to the non-human primate (NHP) (Macaca mulatta, NCBI version Mmul 8.0.1) genome assembly using HiSat2 v2.1.07. Gene expression quantification was performed using HTSeq-count v0.9.18 and trimmed mean of M-values (TMM) based normalization of the read counts were carried out using Limma and EdgeR v3.18.1 packages on the RStudio GUI v1.1.419 in a R v3.4 statistical software environment. Genes were filtered based on expression within a cell subset if ≥50% of the samples within a comparison group had normalized read counts per million ≥1. On average a total of 11286 genes were expressed per animal.

[0151] Microarray Data

[0152] Published normalized log transformed microarray data from two vaccine studies, DNA-SIV/ALVAC+gp120 and ALVAC-SIV/gp120, were downloaded from the GEO database (http://www.ncbi.nlm.nih.gov/geo/) having accession codes GSE108011 and GSE72624 respectively. The studies are published as Vaccari, M., et al., Adjuvant-dependent innate and adaptive immune signatures of risk of SIVmac251 acquisition, Nat. Med. 22, 762-770 (2016) and Vaccari, M., et al., HIV vaccine candidate activation of hypoxia and the inflammasome in CD14(+) monocytes is associated with a decreased risk of SIVmac251 acquisition, Nat. Med. 24, 847-856 (2018), respectively. For the DNA-SIV/ALVAC+gp120 study (N=12), microarray data from 1 week after the second boost time points were analyzed. For the ALVAC-SIV/gp120 study (N=27), time points 24 hours after the third immunization were analyzed. All microarray datasets used in this study were generated on the Human HT-12 v4.0 expression beadchip platform (Illumina). The samples in each study were grouped into outcomes after challenge or infection status post-vaccination at the end of 3 years in the study.

[0153] Immune Response Data

[0154] Functional immune response data for the Barouch I and Barouch II studies were described previously in those studies. Additional assays including IgG breadth and antigen-dependent neutrophil phagocytosis (ADNP) were analyzed. IgG binding activity was measured against 15 SIV antigens in the Barouch I study and 22 HIV antigens in the Barouch II study. IgG breadth was calculated by the sum of the measurements whose binding activity were above the median of the measurement across all animals in the trial. Antibody-dependent neutrophil-mediated phagocytosis (ADNP) assay was measured in the Barouch II study. ADNP was assessed by the measurement of the uptake of antibody-opsonized, antigen-coated fluorescent beads by primary neutrophils. Biotinylated A244 gp120 was used to saturate the binding sites on 1 μm fluorescent neutravidin beads (Invitrogen). Excess antigen was removed by washing the beads, which were then incubated with NHP antibody samples for 20 minutes at 37° C. Leukocytes were isolated from blood collected from HIV seronegative donors after ACK lysis of red blood cells. Following opsonization, the freshly isolated leukocytes were added, and the cells were incubated for 1 hour at 37° C. to allow phagocytosis. The cells were then stained for CD66b to identify neutrophils, fixed, and the extent of phagocytosis was measured by flow cytometry on a Stratedigm S1000EXi flow cytometer (San Jose, Calif.). The data are reported as a phagocytic score as described previously in Darrah, P. A. et al., Multifunctional TH1 cells define a correlate of vaccine-mediated protection against Leishmania major, Nat. Med. 13, 843-50 (2007).

[0155] Quantitative PCR

[0156] Gene expression data were confirmed by quantitative PCR (qPCR). Since only small amounts of RNA were available, the Fluidigm BioMark platform was used for validation (Fluidigm, San Francisco, Calif.). cDNA was synthesized by reverse transcription (RT) from 2.5 ng RNA extracted from sorted B cells using RT preamplification reaction mix, composed of TaqMan® Fast Virus 1-Step Master Mix (Applied Biosystems) and a pooled 96 target TaqMan® assay mix (ThermoFisher Scientific; Waltham, Mass.). The RT reaction was performed in three steps: cDNA synthesis (50° C. for 10 min), denaturation (95° C. for 2 min), and preamplification (18 cycles of 95° C. for 15 sec and 60° C. for 4 min).

[0157] The synthesized cDNA was diluted 1:5 with DNA Suspension Buffer (Teknova). TaqMan® Gene Expression assays (ThermoFisher Scientific) and sample mixes were added to a primed GE 96.96 Dynamic Array chip, which was loaded into the IFC Controller, and subsequently amplified on the BioMark HD using the GE 96×96 standard v2 protocol (all Fluidigm) per manufacturer's instructions. The cycle threshold (Ct) values were validated and exported using the Fluidigm BioMark gene expression real-time PCR analysis software (Fluidigm). Each target gene Ct value was normalized against a housekeeping gene, GAPDH. Individual gene expression was calculated relative to a healthy control NHP sample using the ΔΔCt method. All assays were previously validated for exponential amplification and linear dependence on input.

[0158] Statistical Analysis

[0159] To reduce the stringent limitations of differential expression analyses at the single gene level imposed by multiple hypothesis corrections, normalized RNA-Seq transcription profiles from CD4+ and CD8+ T-cells, B cells, and NK cells were analyzed using the Gene Set Enrichment Analysis (GSEA) method, as discussed in Subramanian, A., et al., Gene set enrichment analysis: a knowledge-based approach for interpreting genome-wide expression profiles, Proc. Natl. Acad. Sci. USA 102, 15545-15550 (2005). GSEA uses gene sets established a priori that have been grouped together based on involvement in particular biological functions or chromosomal location. Genes are ranked based on a signal-to-noise metric that differentiates enriched genes with user provided phenotypes. These genes are then evaluated to determine if a member of a gene set occurs at the top or bottom of the ranked list and generates a Kolmogorov-Smirnov-like statistic called Enrichment Score (ES). The statistical significance of the ES is estimated by gene-set permutation tests in order to produce a null distribution. Genes were analyzed against the C2 canonical pathways collections comprising 1329 individual gene sets from BioCarta, KEGG, Reactome, and other online databases, and the C7 immunologic signatures gene set collection comprising 4872 individual gene sets representing cell types, states, and perturbations within the immune system generated by manual curation of published studies. For each GSEA comparison, gene sets were tested to evaluate if the genes significantly associated with protection against challenge. Signatures were considered significantly protective if genes were enriched in the protected versus infected animals using a threshold of P<0.001 and Normalized Enrichment Score (NES) ≥1.4. Signatures were further down-selected if they overlapped in the Ad26/gp140 arms of the Barouch I and Barouch II studies.

[0160] One signature in B cells, having the GSEA name GSE29618_BCELL_VS_MONOCYTE_DAY7_FLU_VACCINE_DN, associated with protection against acquisition. This gene set previously expressed in humans contains 200 genes that are down-regulated in comparison to B cells from influenza vaccines at day 7 versus monocytes from influenza vaccines at day 7 and were published in Nakaya, H. I., et al., Systems biology of vaccination for seasonal influenza in humans, Nat. Immunol., 12(8), 786-95 (2011). Of the 200 genes in this gene set, 140 were expressed in the RNA-Seq data generated in the NHP samples from Barouch I and Barouch II discussed above.

[0161] For further analysis, a total of 36 enriched genes in the B cell signature from the Barouch I study were identified by GSEA and were selected for downstream processing as described below. The 36 enriched genes included the following: ACSL1, ALDH3B1, BHLHE40, CD302, CD4, CDC42EP3, CDC42EP4, CREB5, CREG1, DAPK1, DOCK5, EMILIN2, ERMAP, GAS7, GLA, IRAK3, LAMP2, LMNA, MGST2, NFIL3, NLRP3, OGFRL1, PHACTR2, RAB32, REEP4, RNF130, RRAGD, RTN1, SDCBP, SIRPA, SLC27A3, ST3GAL6, TKT, TNFRSF1B, TNFSF13, and VEGFA. An average gene enrichment scores (GES) for each sample calculated from the 36 enriched genes are shown below in Table 2.

TABLE 2
Average GES for each sample (N = 10) from Barouch I data set

| | | Average |
|---|---|---|
| | | GES + |
| | | constant to |
| Sample | Average | yield positive |
| ID No: | GES | value |
| 72-06 | 0.0096 | 1.7719 |
| (Infected) | | |
| 75-06 | −0.7623 | 1 |
| (Infected) | | |
| 87-06 | −0.5717 | 1.1905 |
| (Infected) | | |
| 90-06 | −0.3419 | 1.4203 |
| (Infected) | | |
| 302-07 | −0.1564 | 1.6059 |
| (Infected) | | |
| 69-06 | 0.4047 | 2.1670 |
| (Protected) | | |
| 136-06 | 0.6675 | 2.4398 |
| (Protected) | | |
| 190-07 | −0.3168 | 1.4455 |
| (Protected) | | |
| 191-07 | 0.7184 | 2.4807 |
| (Protected) | | |
| 280-07 | 0.3488 | 2.1111 |
| (Protected) | | |

[0162] Likewise, a total of 62 enriched genes in the B cell signature from the Ad26/Ad26+gp140 arm from the Barouch II study were identified by GSEA. The 62 enriched genes included the following: ACSL1, AHNAK, AOAH, ARHGEF10L, ARRB1, BHLHE40, CAMKK2, CD86, CD163, CDC42EP3, CEBPA, CEBPD, CLEC4A, CPD, CPPED1, CREB5, CREG1, CSF3R, CST1, CTNNA1, DAPK1, DOCK5, EMILIN2, ENO1, ERMAP, FAM105A, FBXL5, GLA, GNS, HBEGF, HEXB, HPSE, HSBP1, ID2, IRAK3, KIAA0513, LAMP2, LMNA, MAFB, MAPKAPK3, MICAL2, MYO1F, NFIL3, OGFRL1, PGD, PSAP, RAB27A, RNF130, RRAGD, RXRA, SCARB2, SDCBP, SEMA4A, SLC31A2, SLC36A1, STX11, TBC1D8, TNFRSF1B, TNFSF13, VEGFA, VPS37C, and WDFY3. Gene enrichment scores for the 62 enriched genes are shown below in Table 3.

TABLE 3
Average GES for each sample (N = 12) from Barouch
II data set, Ad26/Ad26 + gp140 arm

| | | Average |
|---|---|---|
| | | GES + |
| | | constant to |
| Sample | Average | yield positive |
| ID No: | GES | value |
| DEMN_54 | −0.0452 | 1.5440 |
| (Protected) | | |
| DEMP_54 | 0.0921 | 1.6813 |
| (Protected) | | |
| DENA_54 | −0.0417 | 1.5475 |
| (Protected) | | |
| DENB_54 | 0.0418 | 1.6309 |
| (Protected) | | |
| DENH_54 | 1.6135 | 3.2023 |
| (Protected) | | |
| DENJ_54 | 0.1280 | 1.7171 |
| (Protected) | | |
| DENL_54 | −0.1855 | 1.4037 |
| (Protected) | | |
| DFHE_54 | 0.2324 | 1.8216 |
| (Protected) | | |
| DEMX_54 | −0.4338 | 1.1553 |
| (Infected) | | |
| DEMZ_54 | −0.5655 | 1.0237 |
| (Infected) | | |
| DFFZ_54 | −0.5892 | 1 |
| (Infected) | | |
| MHD_54 | −0.2469 | 1.3423 |
| (Infected) | | |

[0163] Similarly, a total of 52 enriched genes in the B cell signature from the Ad26/gp140 arm from the Barouch II study were identified by GSEA. The 52 enriched genes included the following: ALDOA, AOAH, AP2S, APOBR, ARHGEF10L, ATF3, CD163, CEBPD, CLEC4A, CREB5, CSFIR, CSF3R, CST3, CTNNA1, DOCK5, DUSP6, EFHD2, ERMAP, FCGRT, GAA, GABARAPL1, GNAO, GRN, H2AFY, HBEGF, HSBP1, ICAM1, IRAK3, IL17RA, KIAA0513, KLF10, LST1, MAFB, MCL1, NAGA, NAMPT, NLRP3, OGFRL1, PSAP, PSTPIP1, RAB32, RGS10, RNF130, SIRPA, SLCO3A1, TBC1D8, TKT, TNFSF13, TRIB1, TYROBP, VIM, and WDFY3. Gene enrichment scores for the 52 enriched genes are shown below in Table 4.

TABLE 4
Average GES for each sample (N = 11)
from the Barouch II data set, Ad26/gp140 arm

| | | Average |
|---|---|---|
| | | GES + |
| | | constant to |
| Sample | Average | yield positive |
| ID No: | GES | value |
| DEKG_54 | 0.3322 | 2.0020 |
| (Protected) | | |
| DEM5_54 | 1.1984 | 2.8683 |
| (Protected) | | |
| DFBX_54 | −0.0675 | 1.6024 |
| (Protected) | | |
| DFCJ_54 | 0.9152 | 2.5850 |
| (Protected) | | |
| DEIL_54 | −0.3769 | 1.2930 |
| (Infected) | | |
| DEJA_54 | −0.3581 | 1.3118 |
| (Infected) | | |
| DEJE_54 | −0.6698 | 1 |
| (Infected) | | |
| DEJG_54 | −0.3489 | 1.3209 |
| (Infected) | | |
| DEKF_54 | −0.2564 | 1.4135 |
| (Infected) | | |
| DELM_54 | −0.5534 | 1.1164 |
| (Infected) | | |
| MH3_54 | −0.1852 | 1.8550 |
| (Infected) | | |

[0164] A composite GES of the enriched genes in the Barouch I study was computed by averaging Z scores of the normalized gene expression for each monkey. Prediction models for infection status were generated using the composite GES from 32 of the 36 enriched genes from Barouch I. Four of the enriched genes, including ALDH3B1, CD302, RTN1 and SLC27A3, were not considered as they did not pass the EdgeR filtering step. Accordingly, the following 32 genes were used to compute the GES: ACSL1, BHLHE40, CD4, CDC42EP3, CDC42EP4, CREB5, CREG1, DAPK1, DOCK5, EMILIN2, ERMAP, GAS7, GLA, IRAK3, LAMP2, LMNA, MGST2, NFIL3, NLRP3, OGFRL1, PHACTR2, RAB32, REEP4, RNF130, RRAGD, SDCBP, SIRPA, ST3GAL6, TKT, TNFRSF1B, TNFSF13, and VEGFA.

[0165] A GES was also computed for the same 32 genes in the two different arms of the Barouch II study (i.e., the Ad26/Ad26+gp140 arm and the Ad26/gp140 arm). Bootstrap optimism-corrected Area under Receiver Operating Characteristics (ROC) Curves (AUC) were used for internal validation of model discrimination. The performance of the classifier was assessed using AUC. An AUC of 0.5 indicated random discrimination and 1 indicated perfect discrimination capabilities. The performance of this classifier was then assessed on the Ad26/gp140 test and Ad26/Ad26+gp140 validation datasets of the Barouch II study. Similar prediction analysis was performed using a GES of 30 enriched genes from the Barouch I study, and tested in the Ad26/MVA+gp140 arm in the Barouch II study, as two of the enriched genes (TKT, RRAGD) did not pass the filtering step.

[0166] For the RV144 human clinical study, discussed below in Example 2, a total of 63 enriched genes were identified by GSEA. The 63 enriched genes included the following: ADAM9, ALDH3B1, AMPD2, AP2SL, ARRB1, C5AR1, CAMKK2, CCR1, CD14, CD163, CD68, CEBPA, CSFIR, CST3, CTBP2, CTSD, DAPK1, DUSP6, FCGRT, FLVCR2, FZDJ, GAA, GAS7, GRN, HMOX1, IL17RA, IMPA2, KIAA0513, LEPROT LGALS2, LMNA, LRPAP1, MAFB, MPP1, MYO1F, NAGA, NPL, PGD, PKM2, PSAP, PTGER2, PAN, PYGL, QPCT, RAB20, RBM47, RNF130, SCARB2, SEMA4A, SERINC5, SIRPA, SIRPB1, SLC36A1, SLCO3A1, SORT1, SULT1A2, TBC1D8, TBXAS1, TIMP2, TKT, TYROBP, ZDHHC7, and ZNF467. The mean GES is statistically significantly greater in subjects who received HIV vaccine, developed protective immunity, and remained uninfected (3.11), than in those who received HIV vaccine but acquired infection (2.73) (p<0.001) (FIG. 8).

[0167] Protection as defined by number of challenges required for infection was analyzed by Cox proportional hazard regression using the GES as a continuous variable for both the Barouch I and Barouch II studies. The GES from the two arms of the Barouch II study (Ad26/gp140 and Ad26/Ad26+gp140) were combined for this analysis and all other analysis mentioned below.

[0168] As shown in FIG. 1, the ROC curve (AUC 0.92) illustrates the ability of the GES of enriched genes from the Barouch I study to predict protection from virus acquisition. For the Barouch I samples, a hazard ratio of 0.01 was calculated, with a 95% confidence interval (CI) of 0.0002-0.68 and a p-value of 0.032. Likewise, FIG. 2 shows the ROC curves (AUC 0.75; AUC 0.81) for both arms of the Barouch II study, demonstrating the ability of the GES of the enriched genes to predict protection from virus acquisition. For the Barouch II samples, a hazard ratio of 0.05 was calculated, with a 95% CI of 0.004-0.58 and a p-value of 0.017.

[0169] GES was also tested as a categorical variable by stratifying into low versus high groups as determined by the median. All uninfected animals were censored at the last challenge. Survival curves were estimated using the Kaplan-Meier method. As shown in FIG. 3, the composite GES as a categorical variable of the high group in the Barouch I study were higher than those of the low group (p-value=0.056). When the composite GES was calculated as a continuous variable, the results were significantly different (hazard ratio=0.10; 95% CI=0.01-0.82; p-value=0.03), demonstrating reduced risk of infection. FIG. 4 likewise demonstrates a reduced risk of infection in the composite GES as a categorical variable of the high group in the Barouch II study as compared to those in the low group (p-value=0.051). When GES was calculated as a continuous variable for this group, the results were significantly different (hazard ratio=0.32; 95% CI=0.12-0.81; p-value=0.02).

[0170] FIG. 5-7 are scatter plot graphs showing the composite GES calculated for differentially expressed gene sets in both protected and infected groups of various study populations. As shown in FIG. 5, the GES, comprising 32 differentially expressed genes, was significantly higher (p=0.03) in the protected group as compared to the infected group in the Barouch I study population. As shown in FIG. 6, the GES, comprising 52 differentially expressed genes, is significantly higher (p=0.01) in the protected group as compared to the infected group in the Ad26/gp140 arm of the Barouch II study population, and FIG. 7 illustrates that the GES, comprising 62 differentially expressed genes, is significantly higher (p=0.004) in the protected group as compared to the infected group in the Ad26/Ad26+gp140 arm of the Barouch II study population.

[0171] A two-sided P value of less than 0.05 was considered statistically significant for all statistical analysis described above. All descriptive and inferential statistical analyses were performed using R 3.4.1 GUI 1.70 build (7375) v3.0 and higher, and GraphPad Prism 7 statistical software packages (GraphPad Software, La Jolla, Calif.).

### Example 2. The Association of the GES is a Stronger Correlate of Protection than the V1V2-Specific IgG Antibodies Study

[0172] RV144 Human Clinical Study

[0173] RV144 is a phase III efficacy trial in which a ‘prime-boost’ vaccine strategy is evaluated for prevention of infection and amelioration of disease course. The purpose of this study is to determine whether immunizations with an integrated combination of ALVAC-HIV (vCP1521) boosted by AIDSVAX gp120 B/E preventHIV infection in healthy Thai volunteers. ALVAC-HIV (vCP1521) from Sanofi Pasteur is given as the ‘prime’ vaccine at months 0, 1, 3 and 6; AIDSVAX gp120 B/E from VaxGen is given as the ‘boost’ at months 3 and 6. This regimen is given to 8,000 adult Thai subjects, while another 8,000 receive placebos in a double-blinded, randomized manner. Following the completion of each subjects' immunization phase, he/she is followed for 3 years with clinic visits every 6 months with HIV testing and pre- and post-test counseling. Subjects who become HIV infected are counseled, referred to HIV treatment facilities for management according to national guidelines, and offered enrollment in a protocol for extended follow-up.

[0174] Binding ELISA to Scaffolded HIV-1 Envelope V1V2

[0175] Haynes, et al., Immune-Correlates Analysis of an HIV-1 Vaccine Efficacy Trial, New England J. Med. 2012; 366:1275-1286, disclosed an correlation between conferred immunity in the RV144 study and increased binding of IgG antibodies to variable regions 1 and 1 (V1V2) of HIV-1 envelope proteins. In the procedure disclosed in Haynes et al. 2012, Immulon 4HBX plates (Thermo Scientific) were coated with 1 g/ml scaffolded V1V2 (murine leukemia virus gp70-V1V2), stored overnight at 4° C. and then washed 6 times with PBS containing 0.05% Tween-20, pH 7.4, before incubation for 1.5 h at 37° C. with RV144 plasma diluted 1:100 in 15% RPMI media. The plates were washed again 6 times. For detection of bound V1V2 antibodies, alkaline phosphatase-conjugated goat anti-human IgG (SouthemBiotech 1:2000) was added for 1.5 h at 37° C. After washing, 10% diethanolamine substrate was added for 30 min at room temperature to develop color, and the plates were read at 405 nm. At each step, every well contained 50 μl. Each experiment included four negative control wells which contained 15% media without plasma. Each case-control specimen was run in duplicate in each experiment, and three experiments were performed. See Haynes et al. 2012 at Supplementary Appendix. Haynes concluded that “the binding of IgG antibodies to . . . V1V2 of HIV-1 envelope proteins (Env) correlated inversely with the rate of HIV-1 infection (estimated odds ratio, 0.57 per 1-SD increase; P=0.02; q=0.08).” Haynes et al. 2012 at Abstract.

[0176] The association of the GES in the RV144 study, however, is a stronger correlate of protection than the V1V2-specific IgG antibodies study (Haynes et al. 2012) and associates with reduced risk of HIV acquisition and increased vaccine efficacy (Table 5). Vaccinated individuals with high (i.e., top one third of all GES scores) GES have a reduced probability of acquiring HIV-1 acquisition and increased vaccine efficacy (N=170) (FIG. 9, FIG. 10), versus individuals with a medium (i.e., middle one third) GES or a low (i.e., bottom one third) GES. A subset of genes from the gene signature also associated with decreased risk of acquisition in a univariate analysis (Odds ratio<1.0, P<0.05, q<0.1) (FIG. 11A). A stepwise logistic regression multivariate analysis identified specific genes including SEMA4A, SLC36A1, SERINC5, IL17RA, CTSD, CD68, and GAA with reduced risk of acquisition (FIG. 11A). Single cell RNA-Seq (scRNA-seq) data from peripheral blood reveal that majority of the genes in the signature are expressed in cells of the myeloid lineage (FIG. 11B). These genes have a number of biological functions including phagocytosis, immune regulation and proinflammation. Hence, this signature bearing the hallmark of genes that are normally expressed in monocytes is associated with increased HIV vaccine efficacy and immunogenicity. The protective genes did not overlap with the enriched genes in the Barouch I and Barouch II studies.

TABLE 5
GES is associated with lower odds of HIV acquisition
compared to Env-specific IgG antibodies.

| RV144 | N | Odds Ratio | 95% CI | P value | Reference |
|---|---|---|---|---|---|
| GES | 170 | 0.37 | 0.22-0.63 | 0.0002 | |
| Gp70-V1V2 | 246 | 0.7 | 0.49-1.02 | 0.06 | Haynes |
| (IgG) | | | | | et al. |
| | | | | | 2012 |

[0177] All patents, patent applications, and published references cited herein are hereby incorporated by reference in their entirety. While this invention has been particularly shown and described with references to preferred embodiments thereof, it will be understood by those skilled in the art that various changes in form and details may be made therein without departing from the scope of the invention encompassed by the appended claims. The claims are intended to cover the components and steps in any sequence which is effective to meet the objectives there intended, unless the context specifically indicates the contrary.

What is claimed is:

1. A method for predicting effectiveness of a human immunodeficiency virus (HIV) or a simian immunodeficiency virus (SIV) vaccine in a subject that has been vaccinated with the HIV or the SIV vaccine, the method comprising:
(a) detecting expression levels of multiple genes and/or gene products in a biological sample from the subject, wherein the multiple genes and/or gene products have been identified as a differentially expressed gene set associated with efficacy of the HIV or SIV vaccine;
(b) calculating a first composite gene expression score (GES) for the differentially expressed gene set in the biological sample from the subject; and
(c) calculating an average second composite GES for the differentially expressed gene set in biological samples from a plurality of subjects that have been vaccinated with the HIV or SIV vaccine and are not immune to HIV or SIV,
wherein a first composite GES that is greater than the average second composite GES indicates effectiveness of the HIV or SIV vaccine.

2. A method for predicting protective immunity to HIV or SIV infection in a subject that has been vaccinated with an HIV or SIV vaccine, the method comprising:
(a) detecting expression levels of multiple genes and/or gene products in a biological sample from the subject, wherein the multiple genes and/or gene products have been identified as a differentially expressed gene set associated with protective immunity against HIV or SIV;
(b) calculating a first composite gene expression score (GES) for the differentially expressed gene set in the biological sample from the subject; and
(c) calculating an average second composite GES for the differentially expressed gene set in biological samples from a plurality of subjects that have been vaccinated with the HIV or SIV vaccine and are not immune to HIV or SIV,
wherein a first composite GES that is greater than the average second composite GES indicates the subject that has been vaccinated with the HIV or SIV vaccine has protective immunity against HIV or SIV.

3. The method of any one of claims 1-2, wherein the HIV or SIV vaccine comprises an adenovirus serotype 26 (Ad26) vector-based vaccine, a canarypox virus vector-based vaccine, or a retrovirus vector-based vaccine.

4. The method of any of the preceding claims, wherein the HIV or SIV vaccine comprises an HIV or SIV envelope glycoprotein.

5. The method of any of the preceding claims, further comprising a step of identifying the differentially expressed gene set associated with vaccine effectiveness and protective immunity against HIV or SIV.

6. The method of any one of the preceding claims, wherein the subject comprises humans and non-human animals.

7. The method of any one of the preceding claims, wherein the subject is a human.

8. The method of any one of the claims 1-6, wherein the subject is a non-human animal.

9. The method of claim 8, wherein the non-human animal is a non-human primate.

10. The method of any of the preceding claims, wherein the differentially expressed gene set is associated with a B-cell gene signature or a monocyte gene signature.

11. The method of any of the preceding claims, wherein the biological sample comprises blood, peripheral blood mononuclear cells, white blood cells, lymphocytes, granulocytes, monocytes, macrophages, or any combination thereof.

12. The method of any of the preceding claims, wherein the first and second composite GES are calculated by averaging Z scores calculated by comparison to normalized gene expression for each gene in the differentially expressed gene set.

13. The method of claim 12, wherein the normalized gene expression is measured from biological samples from subjects that have not been vaccinated with the HIV or SIV vaccine and are not infected with HIV or SIV.

14. The method of any of the preceding claims, wherein the differentially expressed gene set comprises at least 3, at least 10, at least 15, at least 20, at least 25, at least 30, or 32 genes selected from the group consisting of ACSL1, BHLHE40, CD4, CDC42EP3, CDC42EP4, CREB5, CREG1, DAPK1, DOCK5, EMILIN2, ERMAP, GAS7, GLA, IRAK3, LAMP2, LMNA, MGST2, NFIL3, NLRP3, OGFRL1, PHACTR2, RAB32, REEP4, RNF130, RRAGD, SDCBP, SIRPA, ST3GAL6, TKT, TNFRSF1B, TNFSF13, and VEGFA.

15. The method of claim any of the preceding claims, wherein the differentially expressed gene set comprises BHLHE40, OGFRL1, and TNFSF13.

16. The method of any of the claims 1-13, wherein the differentially expressed gene set comprises at least 7, at least 10, at least 20, at least 30, at least 40, at least 50, at least 60, or 63 genes selected from the group consisting of ADAM9, ALDH3B1, AMPD2, AP2S1, ARRB1, C5AR1, CAMKK2, CCR1, CD14, CD163, CD68, CEBPA, CSFIR, CST3, CTBP2, CTSD, DAPK1, DUSP6, FCGRT, FLVCR2, FZD1, GAA, GAS7, GRN, HMOX1, IL17RA, IMPA2, KIAA0513, LEPROT, LGALS2, LMNA, LRPAP1, MAFB, MPP1, MYO1F, NAGA, NPL, PGD, PKM2, PSAP, PTGER2, PXN, PYGL, QPCT, RAB20, RBM47, RNF130, SCARB2, SEMA4A, SERINC5, SIRPA, SIRPB1, SLC36A1, SLCO3A1, SORT1, SULT1A2, TBC1D8, TBXAS1, TIMP2, TKT, TYROBP, ZDHHC7, and ZNF467.

17. The method of claim 16, wherein the differentially expressed gene set comprises SEMA4A, SLC36A1, SERINC5, IL17RA, CTSD, CD68, and GAA.

18. The method of any of the preceding claims, wherein the composite GES is calculated based on measuring or detecting levels of mRNA, cDNA, or protein products of the genes in the differentially expressed gene set in the biological sample.

19. A kit for use in predicting effectiveness of an HIV or SIV vaccine in a subject, the kit comprising:
(a) reagents for measuring or detecting expression levels of genes and/or gene products selected from the group consisting of BHLHE40, OGFRL1, TNFSF13 and at least 5, at least 10, at least 15, at least 20, at least 25, or 29 genes selected from the group consisting of ACSL1, CD4, CDC42EP3, CDC42EP4, CREB5, CREG1, DAPK1, DOCK5, EMILIN2, ERMAP, GAS7, GLA, IRAK3, LAMP2, LMNA, MGST2, NFIL3, NLRP3, PHACTR2, RAB32, REEP4, RNF130, RRAGD, SDCBP, SIRPA, ST3GAL6, TKT, TNFRSF1B, and VEGFA; and
(b) instructions for how to use the kit.

20. A kit for use in predicting effectiveness of HIV or SIV vaccination in a subject, the kit comprising:
(a) reagents for measuring or detecting expression levels of genes and/or gene products selected from the group consisting of SEMA4A, SLC36A1, SERINC5, IL17RA, CTSD, CD68, GAA and at least 5, at least 10, at least 20, at least 30, at least 40, at least 50, or 56 genes selected from the group consisting of ADAM9, ALDH3B1, AMPD2, AP2S1, ARRB1, C5AR1, CAMKK2, CCR1, CD14, CD163, CEBPA, CSFIR, CST3, CTBP2, DAPK1, DUSP6, FCGRT, FLVCR2, FZD1, GAS7, GRN, HMOX1, IMPA2, KIAA0513, LEPROT, LGALS2, LMNA, LRPAP1, MAFB, MPP1, MYO1F, NAGA, NPL, PGD, PKM2, PSAP, PTGER2, PXN, PYGL, QPCT, RAB20, RBM47, RNF130, SCARB2, SIRPA, SIRPB1, SLCO3A1, SORT1, SULT1A2, TBC1D8, TBXAS1, TIMP2, TKT, TYROBP, ZDHHC7, and ZNF467; and
(b) instructions for how to use the kit.

21. A kit for use in predicting protective immunity to HIV or SIV infection in a subject that has been vaccinated with an HIV or SIV vaccine, the kit comprising:
(a) reagents for measuring or detecting expression levels of genes and/or gene products selected from the group consisting of BHLHE40, OGFRL1, TNFSF13 and at least 5, at least 10, at least 15, at least 20, at least 25, or 29 genes selected from the group consisting of ACSL1, CD4, CDC42EP3, CDC42EP4, CREB5, CREG1, DAPK1, DOCK5, EMILIN2, ERMAP, GAS7, GLA, IRAK3, LAMP2, LMNA, MGST2, NFIL3, NLRP3, PHACTR2, RAB32, REEP4, RNF130, RRAGD, SDCBP, SIRPA, ST3GAL6, TKT, TNFRSF1B, and VEGFA; and
(b) instructions for how to use the kit.

22. A kit for use in predicting protective immunity to HIV or SIV infection in a subject that has been vaccinated with an HIV or SIV vaccine, the kit comprising:
(a) reagents for measuring or detecting expression levels of genes and/or gene products selected from the group consisting of SEMA4A, SLC36A1, SERINC5, IL17RA, CTSD, CD68, GAA and at least 5, at least 10, at least 20, at least 30, at least 40, at least 50, or 56 genes selected from the group consisting of ADAM9, ALDH3B1, AMPD2, AP2S1, ARRB1, C5AR1, CAMKK2, CCR1, CD14, CD163, CEBPA, CSFIR, CST3, CTBP2, DAPK1, DUSP6, FCGRT, FLVCR2, FZD1, GAS7, GRN, HMOX1, IMPA2, KIAA0513, LEPROT, LGALS2, LMNA, LRPAP1, MAFB, MPP1, MYO1F, NAGA, NPL, PGD, PKM2, PSAP, PTGER2, PXN, PYGL, QPCT, RAB20, RBM47, RNF130, SCARB2, SIRPA, SIRPB1, SLCO3A1, SORT1, SULT1A2, TBC1D8, TBXAS1, TIMP2, TKT, TYROBP, ZDHHC7, and ZNF467; and
(b) instructions for how to use the kit.

The application's sequence listing, which the Patent Office published only in electronic form, follows.

SEQUENCE LISTING (136 sequences)

SEQ ID NO: 1 - protein, 698 aa, Homo sapiens
MQAHELFRYFRMPELVDFRQYVRTLPTNTLMGFGAFAALTTFWYATRPKPLKPPCDLSMQSVEVAGSGGARRSALLDSDEPLVYFYDDVTTLYEGFQRGIQVSNNGPCLGSRKPDQPYEWLSYKQVAELSECIGSALIQKGFKTAPDQFIGIFAQNRPEWVIIEQGCFAYSMVIVPLYDTLGNEAITYIVNKAELSLVFVDKPEKAKLLLEGVENKLIPGLKIIVVMDAYGSELVERGQRCGVEVTSMKAMEDLGRANRRKPKPPAPEDLAVICFTSGTTGNPKGAMVTHRNIVSDCSAFVKATENTVNPCPDDTLISFLPLAHMFERVVECVMLCHGAKIGFFQGDIRLLMDDLKVLQPTVFPVVPRLLNRMFDRIFGQANTTLKRWLLDFASKRKEAELRSGIIRNNSLWDRLIFHKVQSSLGGRVRLMVTGAAPVSATVLTFLRAALGCQFYEGYGQTECTAGCCLTMPGDWTAGHVGAPMPCNLIKLVDVEEMNYMAAEGEGEVCVKGPNVFQGYLKDPAKTAEALDKDGWLHTGDIGKWLPNGTLKIIDRKKHIFKLAQGEYIAPEKIENIYMRSEPVAQVFVHGESLQAFLIAIVVPDVETLCSWAQKRGFEGSFEELCRNKDVKKAILEDMVRLGKDSGLKPFEQVKGITLHPELFSIDNGLLTPTMKAKRPELRNYFRSQIDDLYSTIKV

SEQ ID NO: 2 - protein, 819 aa, Homo sapiens
MGSGARFPSGTLRVRWLLLLGLVGPVLGAARPGFQQTSHLSSYEIITPWRLTRERREAPRPYSKQVSYVIQAEGKEHIIHLERNKDLLPEDFVVYTYNKEGTLITDHPNIQNHCHYRGYVEGVHNSSIALSDCFGLRGLLHLENASYGIEPLQNSSHFEHIIYRMDDVYKEPLKCGVSNKDIEKETAKDEEEEPPSMTQLLRRRRAVLPQTRYVELFIVVDKERYDMMGRNQTAVREEMILLANYLDSMYIMLNIRIVLVGLEIWTNGNLINIVGGAGDVLGNFVQWREKFLITRRRHDSAQLVLKKGFGGTAGMAFVGTVCSRSHAGGINVFGQITVETFASIVAHELGHNLGMNHDDGRDCSCGAKSCIMNSGASGSRNFSSCSAEDFEKLTLNKGGNCLLNIPKPDEAYSAPSCGNKLVDAGEECDCGTPKECELDPCCEGSTCKLKSFAECAYGDCCKDCRFLPGGTLCRGKTSECDVPEYCNGSSQFCQPDVFIQNGYPCQNNKAYCYNGMCQYYDAQCQVIFGSKAKAAPKDCFIEVNSKGDRFGNCGFSGNEYKKCATGNALCGKLQCENVQEIPVFGIVPAIIQTPSRGTKCWGVDFQLGSDVPDPGMVNEGTKCGAGKICRNFQCVDASVLNYDCDVQKKCHGHGVCNSNKNCHCENGWAPPNCETKGYGGSVDSGPTYNEMNTALRDGLLVFFFLIVPLIVCAIFIFIKRDQLWRSYFRKKRSQTYESDGKNQANPSRQPGSVPRHVSPVTPPREVPIYANRFAVPTYAAKQPQQFPSRPPPPQPKVSSQGNLIPARPAPAPPLYSSLT

SEQ ID NO: 3 - protein, 5890 aa, Homo sapiens
MEKEETTRELLLPNWQGSGSHGLTIAQRDDGVFVQEVTQNSPAARTGVVKEGDQIVGATIYFDNLQSGEVTQLLNTMGHHTVGLKLHRKGDRSPEPGQTWTREVFSSCSSEVVLSGDDEEYQRIYTTKIKPRLKSEDGVEGDLGETQSRTITVTRRVTAYTVDVTGREGAKDIDISSPEFKIKIPRHELTEISNVDVETQSGKTVIRLPSGSGAASPTGSAVDIRAGAISASGPELQGAGHSKLQVTMPGIKVGGSGVNVNAKGLDLGGRGGVQVPAVDISSSLGGRAVEVQGPSLESGDHGKIKFPTMKVPKFGVSTGREGQTPKAGLRVSAPEVSVGHKGGKPGLTIQAPQLEVSVPSANIEGLEGKLKGPQITGPSLEGDLGLKGAKPQGHIGVDASAPQIGGSITGPSVEVQAPDIDVQGPGSKLNVPKMKVPKFSVSGAKGEETGIDVTLPTGEVTVPGVSGDVSLPEIATGGLEGKMKGTKVKTPEMIIQKPKISMQDVDLSLGSPKLKGDIKVSAPGVQGDVKGPQVALKGSRVDIETPNLEGTLTGPRLGSPSGKTGTCRISMSEVDLNVAAPKVKGGVDVTLPRVEGKVKVPEVDVRGPKVDVSAPDVEAHGPEWNLKMPKMKMPTFSTPGAKGEGPDVHMTLPKGDISISGPKVNVEAPDVNLEGLGGKLKGPDVKLPDMSVKTPKISMPDVDLHVKGTKVKGEYDVTVPKLEGELKGPKVDIDAPDVDVHGPDWHLKMPKMKMPKFSVPGFKAEGPEVDVNLPKADVDISGPKIDVTAPDVSIEEPEGKLKGPKFKMPEMNIKVPKISMPDVDLHLKGPNVKGEYDVTMPKVESEIKVPDVELKSAKMDIDVPDVEVQGPDWHLKMPKMKMPKFSMPGFKAEGPEVDVNLPKADVDISGPKVGVEVPDVNIEGPEGKLKGPKFKMPEMNIKAPKISMPDVDLHMKGPKVKGEYDMTVPKLEGDLKGPKVDVSAPDVEMQGPDWNLKMPKIKMPKFSMPSLKGEGPEFDVNLSKANVDISAPKVDTNAPDLSLEGPEGKLKGPKFKMPEMHFRAPKMSLPDVDLDLKGPKMKGNVDISAPKIEGEMQVPDVDIRGPKVDIKAPDVEGQGLDWSLKIPKMKMPKFSMPSLKGEGPEVDVNLPKADVVVSGPKVDIEAPDVSLEGPEGKLKGPKFKMPEMHFKTPKISMPDVDLHLKGPKVKGDVDVSVPKVEGEMKVPDVEIKGPKMDIDAPDVEVQGPDWHLKMPKMKMPKFSMPGFKGEGREVDVNLPKADIDVSGPKVDVEVPDVSLEGPEGKLKGPKFKMPEMHFKAPKISMPDVDLNLKGPKLKGDVDVSLPEVEGEMKVPDVDIKGPKVDISAPDVDVHGPDWHLKMPKVKMPKFSMPGFKGEGPEVDVKLPKADVDVSGPKMDAEVPDVNIEGPDAKLKGPKFKMPEMSIKPQKISIPDVGLHLKGPKMKGDYDVTVPKVEGEIKAPDVDIKGPKVDINAPDVEVHGPDWHLKMPKVKMPKFSMPGFKGEGPEVDMNLPKADLGVSGPKVDIDVPDVNLEAPEGKLKGPKFKMPSMNIQTHKISMPDVGLNLKAPKLKTDVDVSLPKVEGDLKGPEIDVKAPKMDVNVGDIDIEGPEGKLKGPKFKMPEMHFKAPKISMPDVDLHLKGPKVKGDMDVSVPKVEGEMKVPDVDIKGPKVDIDAPDVEVHDPDWHLKMPKMKMPKFSMPGFKAEGPEVDVNLPKADIDVSGPSVDTDAPDLDIEGPEGKLKGSKFKMPKLNIKAPKVSMPDVDLNLKGPKLKGEIDASVPELEGDLRGPQVDVKGPFVEAEVPDVDLECPDAKLKGPKFKMPEMHFKAPKISMPDVDLHLKGPKVKGDADVSVPKLEGDLTGPSVGVEVPDVELECPDAKLKGPKFKMPDMHFKAPKISMPDVDLHLKGPKVKGDVDVSVPKLEGDLTGPSVGVEVPDVELECPDAKLKGPKFKMPEMHFKTPKISMPDVDLHLKGPKVKGDMDVSVPKVEGEMKVPDVDIKGPKMDIDAPDVDVHGPDWHLKMPKMKMPKFSMPGFKAEGPEVDVNLPKADVVVSGPKVDVEVPDVSLEGPEGKLKGPKLKMPEMHFKAPKISMPDVDLHLKGPKVKGDVDVSLPKLEGDLTGPSVDVEVPDVELECPDAKLKGPKFKMPEMHFKTPKISMPDVNLNLKGPKVKGDMDVSVPKVEGEMKVPDVDIRGPKVDIDAPDVDVHGPDWHLKMPKMKMPKFSMPGFKGEGPEVDVNLPKADVDVSGPKVDVEVPDVSLEGPEGKLKGPKFKMPEMHFKTPKISMPDVDFNLKGPKIKGDVDVSAPKLEGELKGPELDVKGPKLDADMPEVAVEGPNGKWKTPKFKMPDMHFKAPKISMPDLDLHLKSPKAKGEVDVDVPKLEGDLKGPHVDVSGPDIDIEGPEGKLKGPKFKMPDMHFKAPNISMPDVDLNLKGPKIKGDVDVSVPEVEGKLEVPDMNIRGPKVDVNAPDVQAPDWHLKMPKMKMPKFSMPGFKAEGPEVDVNLPKADVDISGPKVDIEGPDVNIEGPEGKLKGPKLKMPEMNIKAPKISMPDFDLHLKGPKVKGDVDVSLPKVEGDLKGPEVDIKGPKVDINAPDVGVQGPDWHLKMPKVKMPKFSMPGFKGEGPDGDVKLPKADIDVSGPKVDIEGPDVNIEGPEGKLKGPKFKMPEMNIKAPKISMPDIDLNLKGPKVKGDVDVSLPKVEGDLKGPEVDIKGPKVDIDAPDVDVHGPDWHLKMPKIKMPKISMPGFKGEGPDVDVNLPKADIDVSGPKVDVECPDVNIEGPEGKWKSPKFKMPEMHFKTPKISMPDIDLNLTGPKIKGDVDVTGPKVEGDLKGPEVDLKGPKVDIDVPDVNVQGPDWHLKMPKMKMPKFSMPGFKAEGPEVDVNLPKADVDVSGPKVDVEGPDVNIEGPEGKLKGPKFKMPEMNIKAPKIPMPDFDLHLKGPKVKGDVDISLPKVEGDLKGPEVDIRGPQVDIDVPDVGVQGPDWHLKMPKVKMPKFSMPGFKGEGPDVDVNLPKADLDVSGPKVDIDVPDVNIEGPEGKLKGPKFKMPEMNIKAPKISMPDIDLNLKGPKVKGDMDVSLPKVEGDMKVPDVDIKGPKVDINAPDVDVQGPDWHLKMPKIKMPKISMPGFKGEGPEVDVNLPKADLDVSGPKVDVDVPDVNIEGPDAKLKGPKFKMPEMNIKAPKISMPDLDLNLKGPKMKGEVDVSLANVEGDLKGPALDIKGPKIDVDAPDIDIHGPDAKLKGPKLKMPDMHVNMPKISMPEIDLNLKGSKLKGDVDVSGPKLEGDIKAPSLDIKGPEVDVSGPKLNIEGKSKKSRFKLPKFNFSGSKVQTPEVDVKGKKPDIDITGPKVDINAPDVEVQGKVKGSKFKMPFLSISSPKVSMPDVELNLKSPKVKGDLDIAGPNLEGDFKGPKVDIKAPEVNLNAPDVDVHGPDWNLKMPKMKMPKFSVSGLKAEGPDVAVDLPKGDINIEGPSMNIEGPDLNVEGPEGGLKGPKFKMPDMNIKAPKISMPDIDLNLKGPKVKGDVDISLPKLEGDLKGPEVDIKGPKVDINAPDVDVHGPDWHLKMPKVKMPKFSMPGFKGEGPEVDVTLPKADIDISGPNVDVDVPDVNIEGPDAKLKGPKFKMPEMNIKAPKISMPDFDLNLKGPKMKGDVVVSLPKVEGDLKGPEVDIKGPKVDIDTPDINIEGSEGKFKGPKFKIPEMHLKAPKISMPDIDLNLKGPKVKGDVDVSLPKMEGDLKGPEVDIKGPKVDINAPDVDVQGPDWHLKMPKVKMPKFSMPGFKGEGPDVDVNLPKADLDVSGPKVDIDVPDVNIEGPEGKLKGPKFKMPEMNIKAPKISMPDIDLNLKGPKVKGDMDVSLPKVEGDMQVPDLDIKGPKVDINAPDVDVRGPDWHLKMPKIKMPKISMPGFKGEGPEVDVNLPKADLDVSGPKVDVDVPDVNIEGPDAKLKGPKFKMPEMNIKAPKISMPDFDLHLKGPKVKGDVDVSLPKMEGDLKAPEVDIKGPKVDIDAPDVDVHGPDWHLKMPKVKMPKFSMPGFKGEGPEVDVNLPKADIDVSGPKVDIDTPDIDIHGPEGKLKGPKFKMPDLHLKAPKISMPEVDLNLKGPKMKGDVDVSLPKVEGDLKGPEVDIKGPKVDIDVPDVDVQGPDWHLKMPKVKMPKFSMPGFKGEGPDVDVNLPKADLDVSGPKVDIDVPDVNIEGPDAKLKGPKFKMPEMNIKAPKISMPDFDLHLKGPKVKGDVDVSLPKVEGDLKGPEVDIKGPKVDIDAPDVDVHGPDWHLKMPKVKMPKFSMPGFKGEGPDVDVTLPKADIEISGPKVDIDAPDVSIEGPDAKLKGPKFKMPEMNIKAPKISMPDIDFNLKGPKVKGDVDVSLPKVEGDLKGPEIDIKGPSLDIDTPDVNIEGPEGKLKGPKFKMPEMNIKAPKISMPDFDLHLKGPKVKGDVDVSLPKVESDLKGPEVDIEGPEGKLKGPKFKMPDVHFKSPQISMSDIDLNLKGPKIKGDMDISVPKLEGDLKGPKVDVKGPKVGIDTPDIDIHGPEGKLKGPKFKMPDLHLKAPKISMPEVDLNLKGPKVKGDMDISLPKVEGDLKGPEVDIRDPKVDIDVPDVDVQGPDWHLKMPKVKMPKFSMPGFKGEGPDVDVNLPKADIDVSGPKVDVDVPDVNIEGPDAKLKGPKFKMPEMSIKAPKISMPDIDLNLKGPKVKGDVDVTLPKVEGDLKGPEADIKGPKVDINTPDVDVHGPDWHLKMPKVKMPKFSMPGFKGEGPDVDVSLPKADIDVSGPKVDVDIPDVNIEGPDAKLKGPKFKMPEINIKAPKISIPDVDLDLKGPKVKGDFDVSVPKVEGTLKGPEVDLKGPRLDFEGPDAKLSGPSLKMPSLEISAPKVTAPDVDLHLKAPKIGFSGPKLEGGEVDLKGPKVEAPSLDVHMDSPDINIEGPDVKIPKFKKPKFGFGAKSPKADIKSPSLDVTVPEAELNLETPEISVGGKGKKSKFKMPKIHMSGPKIKAKKQGFDLNVPGGEIDASLKAPDVDVNIAGPDAALKVDVKSPKTKKTMFGKMYFPDVEFDIKSPKFKAEAPLPSPKLEGELQAPDLELSLPAIHVEGLDIKAKAPKVKMPDVDISVPKIEGDLKGPKVQANLGAPDINIEGLDAKVKTPSFGISAPQVSIPDVNVNLKGPKIKGDVPSVGLEGPDVDLQGPEAKIKFPKFSMPKIGIPGVKMEGGGAEVHAQLPSLEGDLRGPDVKLEGPDVSLKGPGVDLPSVNLSMPKVSGPDLDLNLKGPSLKGDLDASVPSMKVHAPGLNLSGVGGKMQVGGDGVKVPGIDATTKLNVGAPDVTLRGPSLQGDLAVSGDIKCPKVSVGAPDLSLEASEGSIKLPKMKLPQFGISTPGSDLHVNAKGPQVSGELKGPGVDVNLKGPRISAPNVDFNLEGPKVKGSLGATGEIKGPTVGGGLPGIGVQGLEGNLQMPGIKSSGCDVNLPGVNVKLPTGQISGPEIKGGLKGSEVGFHGAAPDISVKGPAFNMASPESDFGINLKGPKIKGGADVSGGVSAPDISLGEGHLSVKGSGGEWKGPQVSSALNLDTSKFAGGLHFSGPKVEGGVKGGQIGLQAPGLSVSGPQGHLESGSGKVTFPKMKIPKFTFSGRELVGREMGVDVHFPKAEASIQAGAGDGEWEESEVKLKKSKIKMPKFNFSKPKGKGGVTGSPEASISGSKGDLKSSKASLGSLEGEAEAEASSPKGKFSLFKSKKPRHRSNSFSDEREFSGPSTPTGTLEFEGGEVSLEGGKVKGKHGKLKFGTFGGLGSKSKGHYEVTGSDDETGKLQGSGVSLASKKSRLSSSSSNDSGNKVGIQLPEVELSVSTKKE

SEQ ID NO: 4 - protein, 468 aa, Homo sapiens
MDPLGDTLRRLREAFHAGRTRPAEFRAAQLQGLGRFLQENKQLLHDALAQDLHKSAFESEVSEVAISQGEVTLALRNLRAWMKDERVPKNLATQLDSAFIRKEPFGLVLIIAPWNYPLNLTLVPLVGALAAGNCVVLKPSEISKNVEKILAEVLPQYVDQSCFAVVLGGPQETGQLLEHRFDYIFFTGSPRVGKIVMTAAAKHLTPVTLELGGKNPCYVDDNCDPQTVANRVAWFRYFNAGQTCVAPDYVLCSPEMQERLLPALQSTITRFYGDDPQSSPNLGRIINQKQFQRLRALLGCGRVAIGGQSDESDRYIAPTVLVDVQEMEPVMQEEIFGPILPIVNVQSLDEAIEFINRREKPLALYAFSNSSQVVKRVLTQTSSGGFCGNDGFMHMTLASLPFGGVGASGMGRYHGKFSFDTFSHHRACLLRSPGMEKLNALRYPPQSPRRLRMLLVAMEAQGCSCTLL

SEQ ID NO: 5 - protein, 364 aa, Homo sapiens
MPYQYPALTPEQKKELSDIAHRIVAPGKGILAADESTGSIAKRLQSIGTENTEENRRFYRQLLLTADDRVNPCIGGVILFHETLYQKADDGRPFPQVIKSKGGVVGIKVDKGVVPLAGTNGETTTQGLDGLSERCAQYKKDGADFAKWRCVLKIGEHTPSALAIMENANVLARYASICQQNGIVPIVEPEILPDGDHDLKRCQYVTEKVLAAVYKALSDHHIYLEGTLLKPNMVTPGHACTQKFSHEEIAMATVTALRRTVPPAVTGITFLSGGQSEEEASINLNAINKCPLLKPWALTFSYGRALQASALKAWGGKKENLKAAQEEYVKRALANSLACQGKYTPSGQAGAAASESLFVSNHAY

SEQ ID NO: 6 - protein, 825 aa, Homo sapiens
MASYPSGSGKPKAKYPFKKRASLQASTAAPEARGGLGAPPLQSARSLPGPAPCLKHFPLDLRTSMDGKCKEIAEELFTRSLAESELRSAPYEFPEESPIEQLEERRQRLERQISQDVKLEPDILLRAKQDFLKTDSDSDLQLYKEQGEGQGDRSLRERDVLEREFQRVTISGEEKCGVPFTDLLDAAKSVVRALFIREKYMALSLQSFCPTTRRYLQQLAEKPLETRTYEQGPDTPVSADAPVHPPALEQHPYEHCEPSTMPGDLGLGLRMVRGVVHVYTRREPDEHCSEVELPYPDLQEFVADVNVLMALIINGPIKSFCYRRLQYLSSKFQMHVLLNEMKELAAQKKVPHRDFYNIRKVDTHIHASSCMNQKHLLRFIKRAMKRHLEEIVHVEQGREQTLREVFESMNLTAYDLSVDTLDVHADRNTFHRFDKFNAKYNPIGESVLREIFIKTDNRVSGKYFAHIIKEVMSDLEESKYQNAELRLSIYGRSRDEWDKLARWAVMHRVHSPNVRWLVQVPRLFDVYRTKGQLANFQEMLENIFLPLFEATVHPASHPELHLFLEHVDGFDSVDDESKPENHVFNLESPLPEAWVEEDNPPYAYYLYYTFANMAMLNHLRRQRGFHTFVLRPHCGEAGPIHHLVSAFMLAENISHGLLLRKAPVLQYLYYLAQIGIAMSPLSNNSLFLSYHRNPLPEYLSRGLMVSLSTDDPLQFHFTKEPLMEEYSIATQVWKLSSCDMCELARNSVLMSGFSHKVKSHWLGPNYTKEGPEGNDIRRTNVPDIRVGYRYETLCQELALITQAVQSEMLETIPEEAGITMSPGPQ

SEQ ID NO: 7 - protein, 575 aa, Homo sapiens
MQSPWKILTVAPLFLLLSLQSSASPANDDQSRPSLSNGHTCVGCVLVVSVIEQLAQVHNSTVQASMERLCSYLPEKLFLKTTCYLVIDKFGSDIIKLLSADMNADVVCHTLEFCKQNTGQPLCHLYPLPKETWKFTLQKARQIVKKSPILKYSRSGSDICSLPVLAKICQKIKLAMEQSVPFKDVDSDKYSVFPTLRGYHWRGRDCNDSDESVYPGRRPNNWDVHQDSNCNGIWGVDPKDGVPYEKKFCEGSQPRGIILLGDSAGAHFHISPEWITASQMSLNSFINLPTALTNELDWPQLSGATGFLDSTVGIKEKSIYLRLWKRNHCNHRDYQNISRNGASSRNLKKFIESLSRNKVLDYPAIVIYAMIGNDVCSGKSDPVPAMTTPEKLYSNVMQTLKHLNSHLPNGSHVILYGLPDGTFLWDNLHNRYHPLGQLNKDMTYAQLYSFLNCLQVSPCHGWMSSNKTLRTLTSERAEQLSNTLKKIAASEKFTNFNLFYMDFAFHEIIQEWQKRGGQPWQLIEPVDGFHPNEVALLLLADHFWKKVQLQWPQILGKENPFNPQIKQVFGDQGGH

SEQ ID NO: 8 - protein, 142 aa, Homo sapiens
MIRFILIQNRAGKTRLAKWYMQFDDDEKQKLIEEVHAVVTVRDAKHTNFVEFRNFKIIYRRYAGLYFCICVDVNDNNLAYLEAIHNFVEVLNEYFHNVCELDLVFNFYKVYTVVDEMFLAGEIRETSQTKVLKQLLMLQSLE

SEQ ID NO: 9 - protein, 1097 aa, Homo sapiens
MDFLRLYLPGLHQALRGALDSLGTFVSYLLGDAVPTVEREAQAAEELGVVAVGKTGKIVEEEAQEDLEGLRGSQNEGAGRLRGPGDDRRHEVGSSAVEQTWGWGDGSSHGSQAERQDSGAGETAKAARCQEPSAHLEARKKSKAGSGACQDRSGQAQERQESHEQEVNREERLRSWEQEEEEEEVRAREPGMARGAESEWTWHGETEGKAGAVGPKAAGDNREMEQGVREADAGETEEPGAEGAGKGEEVVVVEKACESTRAWGTWGPGAEPEDWGILGREEARTTPGREEARAILDGEEARTISGGEEAETASGGEEAETASGGEEAGTASGGEEAGIASGGEAGTASGGEEAGTASGGEEAGTASGGDEAWTTSGKEEADLLGVRQTEYGAVPGERLLEATGKVWVLEEEGDEEREAEVSPFPKQPQVLGTERTEEAAESQTAGREAVGGQEAGESFEGQVDLRGKEAEMRQDLGIRADRARMEELVQAEEAQEERGSSRDPVAELPSDGEAEGTADLEATPEARPEEELTGEESEAAQTSCGLLGVEWGGLTHSVTKGQGPELMGGAQTPTKQPEEREAGEVELMGVLALSKEEQERSLEAGPRHAGSVKPEASEAFPGAWENRTRKDMERGNTQEDAADGEQREEEETAGGQTLAAEAEGDRESELSEVPEAGGEGLTTQDAGCGTEEGEASVSENQELDGSTGADAGPCPSLGEAYARETEDEEAEADRTSRRGWRLQAVAVGLPDREDAQTGSVAAGIMGGDVVPHISAAGAGEALEGVLGQGWDSKEKEEAAAGEHAGGQEFGLEGSAEEEVTGRGSQVEAFESREGGPWGGRVEAEESAGAEDSCGLDPAGSQTARAEGMGAMVEAGGLLEKWTLLEEEAVGWQEREQREDSEGRCGDYHPEGEAPRLLDAEGLMVTGGRRAEAKETEPESLEHVRGQEEQPTHQAPAEAAPESVGEAETAEAMGSARGGAANSWSEAPLPGSLLDVSVPRSRVHLSRSSSQRRSRPSFRRTPAWEQQEEPPAPNPPEEELSAPEQRPLQLEEPLEPSPLRHDGTPVPARRRPLGHGFGLAHPGMMQELQARLGRPKPQ

SEQ ID NO: 10 - protein, 1279 aa, Homo sapiens
MASSNPPPQPAIGDQLVPGVPGPSSEAEDDPGEAFEFDDSDDEEDTSAALGVPSLAPERDTDPPLIHLDSIPVTDPDPAAAPPGTGVPAWVSNGDAADAAFSGARHSSWKRKSSRRIDRFTFPALEEDVIYDDVPCESPDAHQPGAERNLLYEDAHRAGAPRQAEDLGWSSSEFESYSEDSGEEAKPEVEVEPAKHRVSFQPKLSPDLTRLKERYARTKRDILALRVGGRDMQELKHKYDCKMTQLMKAAKSGTKDGLEKTRMAVMRKVSFLHRKDVLGDSEEEDMGLLEVSVSDIKPPAPELGPMPEGLSPQQVVRRHILGSIVQSEGSYVESLKRILQDYRNPLMEMEPKALSARKCQVVFFRVKEILHCHSMFQIALSSRVAEWDSTEKIGDLFVASFSKSMVLDVYSDYVNNFTSAMSIIKKACLTKPAFLEFLKRRQVCSPDRVTLYGLMVKPIQRFPQFILLLQDMLKNTPRGHPDRLSLQLALTELETLAEKLNEQKRLADQVAEIQQLTKSVSDRSSLNKLLTSGQRQLLLCETLTETVYGDRGQLIKSKERRVFLLNDMLVCANINFKPANHRGQLEISSLVPLGPKYVVKWNTALPQVQVVEVGQDGGTYDKDNVLIQHSGAKKASASGQAQNKVYLGPPRLFQELQDLQKDLAVVEQITLLISTLHGTYQNLNMTVAQDWCLALQRLMRVKEEEIHSANKCRLRLLLPGKPDKSGRPISFMVVFITPNPLSKISWVNRLHLAKIGLREENQPGWLCPDEDKKSKAPFWCPILACCIPAFSSRALSLQLGALVHSPVNCPLLGFSAVSTSLPQGYLWVGGGQEGAGGQVEIFSLNRPSPRTVKSFPLAAPVLCMEYIPELEEEAESRDESPTVADPSATVHPTICLGLQDGSILLYSSVDTGTQCLVSCRSPGLQPVLCLRHSPFHLLAGLQDGTLAAYPRTSGGVLWDLESPPVCLTVGPGPVRTLLSLEDAVWASCGPRVTVLEATTLQPQQSFEAHQDEAVSVTHMVKAGSGVWMAFSSGTSIRLFHTETLEHLQEINIATRTTFLLPGQKHLCVTSLLICQGLLWVGTDQGVIVLLPVPRLEGIPKITGKGMVSLNGHCGPVAFLAVATSILAPDILRSDQEEAEGPRAEEDKPDGQAHEPMPDSHVGRELTRKKGILLQYRLRSTAHLPGPLLSMREPAPADGAALEHSEEDGSIYEMADDPDIWVRSRPCARDAHRKEICSVAIISGGQGYRNFGSALGSSGRQAPCGETDSTLLIWQVPLML

SEQ ID NO: 11 - protein, 418 aa, Homo sapiens
MGDKGTRVFKKASPNGKLTVYLGKRDFVDHIDLVDPVDGVVLVDPEYLKERRVYVTLTCAFRYGREDLDVLGLTFRKDLFVANVQSFPPAPEDKKPLTRLQERLIKKLGEHAYPFTFEIPPNLPCSVTLQPGPEDTGKACGVDYEVKAFCAENLEEKIHKRNSVRLVIRKVQYAPERPGPQPTAETTRQFLMSDKPLHLEASLDKEIYYHGEPISVNVHVTNNTNKTVKKIKISVRQYADICLFNTAQYKCPVAMEEADDTVAPSSTFCKVYTLTPFLANNREKRGLALDGKLKHEDTNLASSTLLREGANREILGIIVSYKVKVKLVVSRGGLLGDLASSDVAVELPFTLMHPKPKEEPPHREVPENETPVDTNLIELDTNDDDIVFEDFARQRLKGMKDDKEEEEDGTGSPQLNNR

SEQ ID NO: 12 - protein, 181 aa, Homo sapiens
MMLQHPGQVSASEVSASAIVPCLSPPGSLVFEDFANLTPFVKEELRFAIQNKHLCHRMSSALESVTVSDRPLGVSITKAEVAPEEDERKKRRRERNKIAAAKCRNKKKEKTECLQKESEKLESVNAELKAQIEELKNEKQHLIYMLNLHRPTCIVRAQNGRTPEDERNLFIQQIKEGTLQS

SEQ ID NO: 13 - protein, 412 aa, Homo sapiens
MERIPSAQPPPACLPKAPGLEHGDLPGMYPAHMYQVYKSRRGIKRSEDSKETYKLPHRLIEKKRRDRINECIAQLKDLLPEHLKLTTLGHLEKAVVLELTLKHVKALTNLIDQQQQKIIALQSGLQAGELSGRNVETGQEMFCSGFQTCAREVLQYLAKHENTRDLKSSQLVTHLHRVVSELLQGGTSRKPSDPAPKVMDFKEKPSSPAKGSEGPGKNCVPVIQRTFAHSSGEQSGSDTDTDSGYGGESEKGDLRSEQPCFKSDHGRRFTMGERIGAIKQESEEPPTKKNRMQLSDDEGHFTSSDLISSPFLGPHPHQPPFCLPFYLIPPSATAYLPMLEKCWYPTSVPVLYPGLNASAAALSSFMNPDKISAPLLMPQRLPSPLPAHPSVDSSVLLQALKPIPPLNLETKD

SEQ ID NO: 14 - protein, 588 aa, Homo sapiens
MSSCVSSQPSSNRAAPQDELGGRGSSSSESQKPCEALRGLSSLSIHLGMESFIVVTECEPGCAVDLGLARDRPLEADGQEVPLDTSGSQARPHLSGRKLSLQERSQGGLAAGGSLDMNGRCICPSLPYSPVSSPQSSPRLPRRPTVESHHVSITGMQDCVQLNQYTLKDEIGKGSYGVVKLAYNENDNTYYAMKVLSKKKLIRQAGFPRRPPPRGTRPAPGGCIQPRGPIEQVYQEIAILKKLDHPNVVKLVEVLDDPNEDHLYMVFELVNQGPVMEVPTLKPLSEDQARFYFQDLIKGIEYLHYQKIIHRDIKPSNLLVGEDGHIKIADFGVSNEFKGSDALLSNTVGTPAFMAPESLSETRKIFSGKALDVWAMGVTLYCFVFGQCPFMDERIMCLHSKIKSQALEFPDQPDIAEDLKDLITRMLDKNPESRIVVPEIKLHPWVTRHGAEPLPSEDENCTLVEVTEEEVENSVKHIPSLATVILVKTMIRKRSFGNPFEGSRREERSLSAPGNLLTKKPTRECESLSELKEARQRRQPPGHRPAPRGGGGSALVRGSPCVESCWAPAPGSPARMHPLRPEEAMEPE

SEQ ID NO: 15 - protein, 355 aa, Homo sapiens
METPNTTEDYDTTTEFDYGDATPCQKVNERAFGAQLLPPLYSLVFVIGLVGNILVVLVLVQYKRLKNMTSIYLLNLAISDLLFLFTLPFWIDYKLKDDWVFGDAMCKILSGFYYTGLYSEIFFIILLTIDRYLAIVHAVFALRARTVTFGVITSIIIWALAILASMPGLYFSKTQWEFTHHTCSLHFPHESLREWKLFQALKLNLFGLVLPLLVMIICYTGIIKILLRRPNEKKSKAVRLIFVIMIIFFLFWTPYNLTILISVFQDFLFTHECEQSRHLDLAVQVTEVIAYTHCCVNPVIYAFVGERFRKYLRQLFHRRVAVHLVKWLPFLSVDRLERVSSTSPSTGEHELSAGF

SEQ ID NO: 16 - protein, 375 aa, Homo sapiens
MERASCLLLLLLPLVHVSATTPEPCELDDEDFRCVCNFSEPQPDWSEAFQCVSAVEVEIHAGGLNLEPFLKRVDADADPRQYADTVKALRVRRLTVGAAQVPAQLLVGALRVLAYSRLKELTLEDLKITGTMPPLPLEATGLALSSLRLRNVSWATGRSWLAELQQWLKPGLKVLSIAQAHSPAFSCEQVRAFPALTSLDLSDNPGLGERGLMAALCPHKFPAIQNLALRNTGMETPTGVCAALAAAGVQPHSLDLSHNSLRATVNPSAPRCMWSSALNSLNLSFAGLEQVPKGLPAKLRVLDLSCNRLNRAPQPDELPEVDNLTLDGNPFLVPGTALPHEGSMNSGVVPACARSTLSVGVSGTLVLLQGARGFA

SEQ ID NO: 17 - protein, 354 aa, Homo sapiens
MRLAVLFSGALLGLLAAQGTGNDCPHKKSATLLPSFTVTPTVTESTGTTSHRTTKSHKTTTHRTTTTGTTSHGPTTATHNPTTTSHGNVTVHPTSNSTATSQGPSTATHSPATTSHGNATVHPTSNSTATSPGFTSSAHPEPPPPSPSPSPTSKETIGDYTWTNGSQPCVHLQAQIQIRVMYTTQGGGEAWGISVLNPNKTKVQGSCEGAHPHLLLSFPYGHLSFGFMQDLQQKVVYLSYMAVEYNVSFPHAAQWTFSAQNASLRDLQAPLGQSFSCSNSSIILSPAVHLDLLSLRLQAAQLPHTGVFGQSFSCPSDRSILLPLIIGLILLGLLALVLIAFCIIRRRPSAYQAL

SEQ ID NO: 18 - protein, 329 aa, Homo sapiens
MDPQCTMGLSNILFVMAFLLSGAAPLKIQAYFNETADLPCQFANSQNQSLSELVVFWQDQENLVLNEVYLGKEKFDSVHSKYMGRTSFDSDSWTLRLHNLQIKDKGLYQCIIHHKKPTGMIRIHQMNSELSVLANFSQPEIVPISNITENVYINLTCSSIHGYPEPKKMSVLLRTKNSTIEYDGVMQKSQDNVTELYDVSISLSVSFPDVTSNMTIFCILETDKTRLLSSPFSIELEDPQPPPDHIPWITAVLPTVIICVMVFCLILWKWKKKKRPRNSYKCGTNTMEREESEQTKKREKIHIPERSDEAQRVFKSSKTSSCDKSDTCF

SEQ ID NO: 19 - protein, 1156 aa, Homo sapiens
MSKLRMVLLEDSGSADFRRHFVNLSPFTITVVLLLSACFVTSSLGGTDKELRLVDGENKCSGRVEVKVQEEWGTVCNNGWSMEAVSVICNQLGCPTAIKAPGWANSSAGSGRIWMDHVSCRGNESALWDCKHDGWGKHSNCTHQQDAGVTCSDGSNLEMRLTRGGNMCSGRIEIKFQGRWGTVCDDNFNIDHASVICRQLECGSAVSFSGSSNFGEGSGPIWFDDLICNGNESALWNCKHQGWGKHNCDHAEDAGVICSKGADLSLRLVDGVTECSGRLEVRFQGEWGTICDDGWDSYDAAVACKQLGCPTAVTAIGRVNASKGFGHIWLDSVSCQGHEPAIWQCKHHEWGKHYCNHNEDAGVTCSDGSDLELRLRGGGSRCAGTVEVEIQRLLGKVCDRGWGLKEADVVCRQLGCGSALKTSYQVYSKIQATNTWLFLSSCNGNETSLWDCKNWQWGGLTCDHYEEAKITCSAHREPRLVGGDIPCSGRVEVKHGDTWGSICDSDFSLEAASVLCRELQCGTVVSILGGAHFGEGNGQIWAEEFQCEGHESHLSLCPVAPRPEGTCSHSRDVGVVCSRYTEIRLVNGKTPCEGRVELKTLGAWGSLCNSHWDIEDAHVLCQQLKCGVALSTPGGARFGKGNGQIWRHMFHCTGTEQHMGDCPVTALGASLCPSEQVASVICSGNQSQTLSSCNSSSLGPTRPTIPEESAVACIESGQLRLVNGGGRCAGRVEIYHEGSWGTICDDSWDLSDAHVVCRQLGCGEAINATGSAHFGEGTGPIWLDEMKCNGKESRIWQCHSHGWGQQNCRHKEDAGVICSEFMSLRLTSEASREACAGRLEVFYNGAWGTVGKSSMSETTVGVVCRQLGCADKGKINPASLDKAMSIPMWVDNVQCPKGPDTLWQCPSSPWEKRLASPSEETWITCDNKIRLQEGPTSCSGRVEIWHGGSWGTVCDDSWDLDDAQVVCQQLGCGPALKAFKEAEFGQGTGPIWLNEVKCKGNESSLWDCPARRWGHSECGHKEDAAVNCTDISVQKTPQKATTGRSSRQSSFIAVGILGVVLLAIFVALFFLTKKRRQRQRLAVSSRGENLVHQIQYREMNSCLNADDLDLMNSSENSHESADFSAAELISVSKFLPISGMEKEAILSHTEKENGNL

SEQ ID NO: 20 - protein, 232 aa, Homo sapiens
MLRAALPALLLPLLGLAAAAVADCPSSTWIQFQDSCYIFLQEAIKVESIEDVRNQCTDHGADMISIHNEEENAFILDTLKKQWKGPDDILLGMFYDTDDASFKWFDNSNMTFDKWTDQDDDEDLVDTCAFLHIKTGEWKKGNCEVSSVEGTLCKTAIPYKRKYLSDNHILISALVIASTVILTVLGAIIWFLYKKHSDSRFTTVFSTAPQSPYNEDCVLVVGEENEYPVQFD

SEQ ID NO: 21 - protein, 458 aa, Homo sapiens
MNRGVPFRHLLLVLQLALLPAATQGKKVVLGKKGDTVELTCTASQKKSIQFHWKNSNQIKILGNQGSFLTKGPSKLNDRADSRRSLWDQGNFPLIIKNLKIEDSDTYICEVEDQKEEVQLLVFGLTANSDTHLLQGQSLTLTLESPPGSSPSVQCRSPRGKNIQGGKTLSVSQLELQDSGTWTCTVLQNQKKVEFKIDIVVLAFQKASSIVYKKEGEQVEFSFPLAFTVEKLTGSGELWWQAERASSSKSWITFDLKNKEVSVKRVTQDPKLQMGKKLPLHLTLPQALPQYAGSGNLTLALEAKTGKLHQEVNLVVMRATQLQKNLTCEVWGPTSPKLMLSLKLENKEAKVSKREKAVWVLNPEAGMWQCLLSDSGQVLLESNIKVLPTWSTPVQPMALIVLGGVAGLLLFIGLGIFFCVRCRHRRRQAERMSQIKRLLSEKKTCQCPHRFQKTCSPI

SEQ ID NO: 22 - protein, 254 aa, Homo sapiens
MPAKTPIYLKAANNKKGKKFKLRDILSPDMISPPLGDFRHTIHIGKEGQHDVFGDISFLQGNYELLPGNQEKAHLGQFPGHNEFFRANSTSDSVFTETPSPVLKNAISLPTIGGSQALMLPLLSPVTFNSKQESFGPAKLPRLSCEPVMEEKAQEKSSLLENGTVHQGDTSWGSSGSASQSSQGRDSHSSSLSEQYPDWPAEDMFDHPTPCELIKGKTKSEESLSDLTGSLLSLQLDLGPSLLDEVLNVMDKNK

SEQ ID NO: 23 - protein, 356 aa, Homo sapiens
MPILKQLVSSSVHSKRRSRADLTAEMISAPLGDFRHTMHVGRAGDAFGDTSFLNSKAGEPDGESLDEQPSSSSSKRSLLSRKFRGSKRSQSVTRGEREQRDMLGSLRDSALFVKNAMSLPQLNEKEAAEKGTSKLPKSLSSSPVKKANDGEGGDEEAGTEEAVPRRNGAAGPHSPDPLLDEQAFGDLTDLPVVPKATYGLKHAESIMSFHIDLGPSMLGDVLSIMDKEEWDPEEGEGGYHGDEGAAGTITQAPPYAVAAPPLARQEGKAGPDLPSLPSHALEDEGWAAAAPSPGSARSMGSHTTRDSSSLSSCTSGILEERSPAFRGPDRARAAVSRQPDKEFSFMDEEEEDEIRV

SEQ ID NO: 24 - protein, 358 aa, Homo sapiens
MESADFYEAEPRPPMSSHLQSPPHAPSSAAFGFPRGAGPAQPPAPPAAPEPLGGICEHETSIDISAYIDPAAFNDEFLADLFQHSRQQEKAKAAVGPTGGGGGGDFDYPGAPAGPGGAVMPGGAHGPPPGYGCAAAGYLDGRLEPLYERVGAPALRPLVIKQEPREEDEAKQLALAGLFPYQPPPPPPPSHPHPHPPPAHLAAPHLQFQIAHCGQTTMHLQPGHPTPPPTPVPSPHPAPALGAAGLPGPGSALKGLGAAHPDLRASGGSGAGKAKKSVDKNSNEYRVRRERNNIAVRKSRDKAKQRNVETQQKVLELTSDNDRLRKRVEQLSRELDTLRGIFRQLPESSLVKAMGNCA

SEQ ID NO: 25 - protein, 269 aa, Homo sapiens
MSAALFSLDGPARGAPWPAEPAPFYEPGRAGKPGRGAEPGALGEPGAAAPAMYDDESAIDFSAYIDSMAAVPTLELCHDELFADLFNSNHKAGGAGPLELLPGGPARPLGPGPAAPRLLKREPDWGDGDAPGSLLPAQVAACAQTVVSLAAAGQPTPPTSPEPPRSSPRQTPAPGPAREKSAGKRGPDRGSPEYRQRRERNNIAVRKSRDKAKRRNQEMQQKLVELSAENEKLHQRVEQLTRDLAGLRQFFKQLPSPPFLPAAGTADCR

SEQ ID NO: 26 - protein, 237 aa, Homo sapiens
MTSEITYAEVRFKNEFKSSGINTASSAASKERTAPHKSNTGFPKLLCASLLIFFLLLAISFFIAFVIFFQKYSQLLEKKTTKELVHTTLECVKKNMPVEETAWSCCPKNWKSFSSNCYFISTESASWQDSEKDCARMEAHLLVINTQEEQDFIFQNLQEESAYFVGLSDPEGQRHWQWVDQTPYNESSTFWHPREPSDPNERCVVLNFRKSPKRWGWNDVNCLGPQRSVCEMMKIHL

SEQ ID NO: 27 - protein, 1380 aa, Homo sapiens
MASGRDERPPWRLGRLLLLMCLLLLGSSARAAHIKKAEATTTTTSAGAEAAEGQFDRYYHEEELESALREAAAAGLPGLARLFSIGRSVEGRPLWVLRLTAGLGSLIPEGDAGPDAAGPDAAGPLLPGRPQVKLVGNMHGDETVSRQVLIYLARELAAGYRRGDPRLVRLLNTTDVYLLPSLNPDGFERAREGDCGFGDGGPSGASGRDNSRGRDLNRSFPDQFSTGEPPALDEVPEVRALIEWIRRNKFVLSGNLHGGSVVASYPFDDSPEHKATGIYSKTSDDEVFKYLAKAYASNHPIMKTGEPHCPGDEDETFKDGITNGAHWYDVEGGMQDYNYVWANCFEITLELSCCKYPPASQLRQEWENNRESLITLIEKVHIGVKGFVKDSITGSGLENATISVAGINHNITTGRFGDFYRLLVPGTYNLTVVLTGYMPLTVTNVVVKEGPATEVDFSLRPTVTSVIPDTTEAVSTASTVAIPNILSGTSSSYQPIQPKDFHHHHFPDMEIFLRRFANEYPNITRLYSLGKSVESRELYVMEISDNPGVHEPGEPEFKYIGNMHGNEVVGRELLLNLIEYLCKNFGTDPEVTDLVHNTRIHLMPSMNPDGYEKSQEGDSISVIGRNNSNNFDLNRNFPDQFVQITDPTQPETIAVMSWMKSYPFVLSANLHGGSLVVNYPFDDDEQGLATYSKSPDDAVFQQIALSYSKENSQMFQGRPCKNMYPNEYFPHGITNGASWYNVPGGMQDWNYLQTNCFEVTIELGCVKYPLEKELPNFWEQNRRSLIQFMKQVHQGVRGFVLDATDGRGILNATISVAEINHPVTTYKTGDYWRLLVPGTYKITASARGYNPVTKNVTVKSEGAIQVNFTLVRSSTDSNNESKKGKGASSSTNDASDPTTKEFETLIKDLSAENGLESLMLRSSSNLALALYRYHSYKDLSEFLRGLVMNYPHITNLTNLGQSTEYRHIWSLEISNKPNVSEPEEPKIRFVAGIHGNAPVGTELLLALAEFLCLNYKKNPAVTQLVDRTRIVIVPSLNPDGRERAQEKDCTSKIGQTNARGKDLDTDFTNNASQPETKAIIENLIQKQDFSLSVALDGGSMLVTYPYDKPVQTVENKETLKHLASLYANNHPSMHMGQPSCPNKSDENIPGGVMRGAEWHSHLGSMKDYSVTYGHCPEITVYTSCCYFPSAARLPSLWADNKRSLLSMLVEVHKGVHGFVKDKTGKPISKAVIVLNEGIKVQTKEGGYFHVLLAPGVHNIIAIADGYQQQHSQVFVHHDAASSVVIVFDTDNRIFGLPRELVVTVSGATMSALILTACIIWCICSIKSNRHKDGFHRLRQHHDEYEDEIRMMSTGSKKSLLSHEFQDETDTEEETLYSSKH

SEQ ID NO: 28 - protein, 314 aa, Homo sapiens
MSAAEAGGVFHRARGRTLAAFPAEKESEWKGPFYFILGADPQFGLIKAWSTGDCDNGGDEWEQEIRLTEQAVQAINKLNPKPKFFVLCGDLIHAMPGKPWRTEQTEDLKRVLRAVDRAIPLVLVSGNHDIGNTPTAETVEEFCRTWGDDYFSFWVGGVLFLVLNSQFYENPSKCPSLKQAQDQWLDEQLSIARQRHCQHAIVFQHIPLFLESIDEDDDYYFNLSKSTRKKLADKFIHAGVKVVFSGHYHRNAGGTYQNLDMVVSSAIGCQLGRDPHGLRVVVVTAEKIVHRYYSLDELSEKGIEDDLMDLIKKK

SEQ ID NO: 29 - protein, 508 aa, Homo sapiens
MIYEESKMNLEQERPFVCSAPGCSQRFPTEDHLMIHRHKHEMTLKFPSIKTDNMLSDQTPTPTRFLKNCEEVGLFSELDCSLEHEFRKAQEEESSKRNISMHNAVGGAMTGPGTHQLSSARLPNHDTNVVIQQAMPSPQSSSVITQAPSTNRQIGPVPGSLSSLLHLHNRQRQPMPASMPGTLPNPTMPGSSAVLMPMERQMSVNSSIMGMQGPNLSNPCASPQVQPMHSEAKMRLKAALTHHPAAMSNGNMNTMGHMMEMMGSRQDQTPHHHMHSHPHQHQTLPPHHPYPHQHQHPAHHPHPQPHHQQNHPHHHSHSHLHAHPAHHQTSPHPPLHTGNQAQVSPATQQMQPTQTIQPPQPTGGRRRRVVDEDPDERRRKFLERNRAAATRCRQKRKVWVMSLEKKAEELTQTNMQLQNEVSMLKNEVAQLKQLLLTHKDCPITAMQKESQGYLSPESSPPASPVPACSQQQVIQHNTITTSSSVSEVVGSSTLSQLTTHRTDLNPIL

SEQ ID NO: 30 - protein, 220 aa, Homo sapiens
MAGLSRGSARALLAALLASTLLALLVSPARGRGGRDHGDWDEASRLPPLPPREDAARVARFVTHVSDWGALATISTLEAVRGRPFADVLSLSDGPPGAGSGVPYFYLSPLQLSVSNLQENPYATLTMTLAQTNFCKKHGFDPQSPLCVHIMLSGTVTKVNETEMDIAKHSLFIRHPEMKTWPSSHNWFFAKLNITNIWVLDYFGGPKIVTPEEYYNVTVQ

SEQ ID NO: 31 - protein, 972 aa, Homo sapiens
MGPGVLLLLLVATAWHGQGIPVIEPSVPELVVKPGATVTLRCVGNGSVEWDGPPSPHWTLYSDGSSSILSTNNATFQNTGTYRCTEPGDPLGGSAAIHLYVKDPARPWNVLAQEVVVFEDQDALLPCLLTDPVLEAGVSLVRVRGRPLMRHTNYSFSPWHGFTIHRAKFIQSQDYQCSALMGGRKVMSISIRLKVQKVIPGPPALTLVPAELVRIRGEAAQIVCSASSVDVNFDVFLQHNNTKLAIPQQSDFHNNRYQKVLTLNLDQVDFQHAGNYSCVASNVQGKHSTSMFFRVVESAYLNLSSEQNLIQEVTVGEGLNLKVMVEAYPGLQGFNWTYLGPFSDHQPEPKLANATTKDTYRHTFTLSLPRLKPSEAGRYSFLARNPGGWRALTFELTLRYPPEVSVIWTFINGSGTLLCAASGYPQPNVTWLQCSGHTDRCDEAQVLQVWDDPYPEVLSQEPFHKVTVQSLLTVETLEHNQTYECRAHNSVGSGSWAFIPISAGAHTHPPDEFLFTPVVVACMSIMALLLLLLLLLLYKYKQKPKYQVRWKIIESYEGNSYTFIDPTQLPYNEKWEFPRNNLQFGKTLGAGAFGKVVEATAFGLGKEDAVLKVAVKMLKSTAHADEKEALMSELKIMSHLGQHENIVNLLGACTHGGPVLVITEYCCYGDLLNFLRRKAEAMLGPSLSPGQDPEGGVDYKNIHLEKKYVRRDSGFSSQGVDTYVEMRPVSTSSNDSFSEQDLDKEDGRPLELRDLLHFSSQVAQGMAFLASKNCIHRDVAARNVLLTNGHVAKIGDFGLARDIMNDSNYIVKGNARLPVKWMAPESIFDCVYTVQSDVWSYGILLWEIFSLGLNPYPGILVNSKFYKLVKDGYQMAQPAFAPKNIYSIMQACWALEPTHRPTFQQICSFLQEQAQEDRRERDYTNLPSSSRSGGSGSSSSELEEESSSEHLTCCEQGDIAQPLLQPNNYQFC

SEQ ID NO: 32 - protein, 836 aa, Homo sapiens
MARLGNCSLTWAALIILLLPGSLEECGHISVSAPIVHLGDPITASCIIKQNCSHLDPEPQILWRLGAELQPGGRQQRLSDGTQESIITLPHLNHTQAFLSCCLNWGNSLQILDQVELRAGYPPAIPHNLSCLMNLTTSSLICQWEPGPETHLPTSFTLKSFKSRGNCQTQGDSILDCVPKDGQSHCCIPRKHLLLYQNMGIWVQAENALGTSMSPQLCLDPMDVVKLEPPMLRTMDPSPEAAPPQAGCLQLCWEPWQPGLHINQKCELRHKPQRGEASWALVGPLPLEALQYELCGLLPATAYTLQIRCIRWPLPGHWSDWSPSLELRTTERAPTVRLDTWWRQRQLDPRTVQLFWKPVPLEEDSGRIQGYVVSWRPSGQAGAILPLCNTTELSCTFHLPSEAQEVALVAYNSAGTSRPTPVVFSESRGPALTRLHAMARDPHSLWVGWEPPNPWPQGYVIEWGLGPPSASNSNKTWRMEQNGRATGFLLKENIRPFQLYEIIVTPLYQDTMGPSQHVYAYSQEMAPSHAPELHLKHIGKTWAQLEWVPEPPELGKSPLTHYTIFWTNAQNQSFSAILNASSRGFVLHGLEPASLYHIHLMAASQAGATNSTVLTLMTLTPEGSELHIILGLFGLLLLLTCLCGTAWLCCSPNRKNPLWPSVPDPAHSSLGSWVPTIMEEDAFQLPGLGTPPITKLTVLEEDEKKPVPWESHNSSETCGLPTLVQTYVLQGDPRAVSTQPQSQSGTSDQVLYGQLLGSPTSPGPGHYLRCDSTQPLLAGLTPSPKSYENLWFQASPLGTLVTPAPSQEDDCVFGPLLNFPLLQGIRVHGMEALGSF

SEQ ID NO: 33 - protein, 141 aa, Homo sapiens
MAQYLSTLLLLLATLAVALAWSPKEEDRIIPGGIYNADLNDEWVQRALHFAISEYNKATKDDYYRRPLRVLRARQQTVGGVNYFFDVEVGRTICTKSQPNLDTCAFHEQPELQKKQLCSFEIYEVPWENRRSLVKSRCQES

SEQ ID NO: 34 - protein, 146 aa, Homo sapiens
MAGPLRAPLLLLAILAVALAVSPAAGSSPGKPPRLVGGPMDASVEEEGVRRALDFAVGEYNKASNDMYHSRALQVVRARKQIVAGVNYFLDVELGRTTCTKTQPNLDNCPFHDQPHLKRKAFCSFQIYAVPWQGTMTLSKSTCQDA

SEQ ID NO: 35 - protein, 445 aa, Homo sapiens
MALVDKHKVKRQRLDRICEGIRPQIMNGPLHPRPLVALLDGRDCTVEMPILKDLATVAFCDAQSTQEIHEKVLNEAVGAMMYHTITLTREDLEKFKALRVIVRIGSGYDNVDIKAAGELGIAVCNIPSAAVEETADSTICHILNLYRRNTWLYQALREGTRVQSVEQIREVASGAARIRGETLGLIGFGRTGQAVAVRAKAFGFSVIFYDPYLQDGIERSLGVQRVYTLQDLLYQSDCVSLHCNLNEHNHHLINDFTIKQMRQGAFLVNAARGGLVDEKALAQALKEGRIRGAALDVHESEPFSFAQGPLKDAPNLICTPHTAWYSEQASLEMREAAATEIRRAITGRIPESLRNCVNKEFFVTSAPWSVIDQQAIHPELNGATYRYPPGIVGVAPGGLPAAMEGIIPGGIPVTHNLPTVAHPSQAPSPNQPTKHGDNREHPNEQ

SEQ ID NO: 36 - protein, 906 aa, Homo sapiens
MTAVHAGNINFKWDPKSLEIRTLAVERLLEPLVTQVTTLVNTNSKGPSNKKRGRSKKAHVLAASVEQATENFLEKGDKIAKESQFLKEELVAAVEDVRKQGDLMKAAAGEFADDPCSSVKRGNMVRAARALLSAVTRLLILADMADVYKLLVQLKVVEDGILKLRNAGNEQDLGIQYKALKPEVDKLNIMAAKRQQELKDVGHRDQMAAARGILQKNVPILYTASQACLQHPDVAAYKANRDLIYKQLQQAVTGISNAAQATASDDASQHQGGGGGELAYALNNFDKQIIVDPLSFSEERFRPSLEERLESIISGAALMADSSCTRDDRRERIVAECNAVRQALQDLLSEYMGNAGRKERSDALNSAIDKMTKKTRDLRRQLRKAVMDHVSDSFLETNVPLLVLIEAAKNGNEKEVKEYAQVFREHANKLIEVANLACSISNNEEGVKLVRMSASQLEALCPQVINAALALAAKPQSKLAQENMDLFKEQWEKQVRVLTDAVDDITSIDDFLAVSENHILEDVNKCVIALQEKDVDGLDRTAGAIRGRAARVIHVVTSEMDNYEPGVYTEKVLEATKLLSNTVMPRFTEQVEAAVEALSSDPAQPMDENEFIDASRLVYDGIRDIRKAVLMIRTPEELDDSDFETEDFDVRSRTSVQTEDDQLIAGQSARAIMAQLPQEQKAKIAEQVASFQEEKSKLDAEVSKWDDSGNDIIVLAKQMCMIMMEMTDFTRGKGPLKNTSDVISAAKKIAEAGSRMDKLGRTIADHCPDSACKQDLLAYLQRIALYCHQLNICSKVKAEVQNLGGELVVSGVDSAMSLIQAAKNLMNAVVQTVKASYVASTKYQKSQGMASLNLPAVSWKMKAPEKKPLVKREKQDETQTKIKRASQKKHVNPVQALSEFKAMDSI

SEQ ID NO: 37 - protein, 412 aa, Homo sapiens
MQPSSLLPLALCLLAAPASALVRIPLHKFTSIRRTMSEVGGSVEDLIAKGPVSKYSQAVPAVTEGPIPEVLKNYMDAQYYGEIGIGTPPQCFTVVFDTGSSNLWVPSIHCKLLDIACWIHHKYNSDKSSTYVKNGTSFDIHYGSGSLSGYLSQDTVSVPCQSASSASALGGVKVERQVFGEATKQPGITFIAAKFDGILGMAYPRISVNNVLPVFDNLMQQKLVDQNIFSFYLSRDPDAQPGGELMLGGTDSKYYKGSLSYLNVTRKAYWQVHLDQVEVASGLTLCKEGCEAIVDTGTSLMVGPVDEVRELQKAIGAVPLIQGEYMIPCEKVSTLPAITLKLGGKGYKLSPEDYTLKVSQAGKTLCLSGFMGMDIPPPSGPLWILGDVFIGRYYTVFDRDNNRVGFAEAARL

SEQ ID NO: 38 - protein, 1430 aa, Homo sapiens
MTVFRQENVDDYYDTGEELGSGQFAVVKKCREKSTGLQYAAKFIKKRRTKSSRRGVSREDIEREVSILKEIQHPNVITLHEVYENKTDVILILELVAGGELFDFLAEKESLTEEEATEFLKQILNGVYYLHSLQIAHFDLKPENIMLLDRNVPKPRIKIIDFGLAHKIDFGNEFKNIFGTPEFVAPEIVNYEPLGLEADMWSIGVITYILLSGASPFLGDTKQETLANVSAVNYEFEDEYFSNTSALAKDFIRRLLVKDPKKRMTIQDSLQHPWIKPKDTQQALSRKASAVNMEKFKKFAARKKWKQSVRLISLCQRLSRSFLSRSNMSVARSDDTLDEEDSFVMKAIIHAINDDNVPGLQHLLGSLSNYDVNQPNKHGTPPLLIAAGCGNIQILQLLIKRGSRIDVQDKGGSNAVYWAARHGHVDTLKFLSENKCPLDVKDKSGEMALHVAARYGHADVAQLLCSFGSNPNIQDKEEETPLHCAAWHGYYSVAKALCEAGCNVNIKNREGETPLLTASARGYHDIVECLAEHGADLNACDKDGHIALHLAVRRCQMEVIKTLLSQGCFVDYQDRHGNTPLHVACKDGNMPIVVALCEANCNLDISNKYGRTPLHLAANNGILDVVRYLCLMGASVEALTTDGKTAEDLARSEQHEHVAGLLARLRKDTHRGLFIQQLRPTQNLQPRIKLKLFGHSGSGKTTLVESLKCGLLRSFFRRRRPRLSSTNSSRFPPSPLASKPTVSVSINNLYPGCENVSVRSRSMMFEPGLTKGMLEVFVAPTHHPHCSADDQSTKAIDIQNAYLNGVGDFSVWEFSGNPVYFCCYDYFAANDPTSIHVVVFSLEEPYEIQLNQVIFWLSFLKSLVPVEEPIAFGGKLKNPLQVVLVATHADIMNVPRPAGGEFGYDKDTSLLKEIRNRFGNDLHISNKLFVLDAGASGSKDMKVLRNHLQEIRSQIVSVCPPMTHLCEKIISTLPSWRKLNGPNQLMSLQQFVYDVQDQLNPLASEEDLRRIAQQLHSTGEINIMQSETVQDVLLLDPRWLCTNVLGKLLSVETPRALHHYRGRYTVEDIQRLVPDSDVEELLQILDAMDICARDLSSGTMVDVPALIKTDNLHRSWADEEDEVMVYGGVRIVPVEHLTPFPCGIFHKVQVNLCRWIHQQSTEGDADIRLWVNGCKLANRGAELLVLLVNHGQGIEVQVRGLETEKIKCCLLLDSVCSTIENVMATTLPGLLTVKHYLSPQQLREHHEPVMIYQPRDFFRAQTLKETSLTNTMGGYKESFSSIMCFGCHDVYSQASLGMDIHASDLNLLTRRKLSRLLDPPDPLGKDWCLLAMNLGLPDLVAKYNTSNGAPKDFLPSPLHALLREWTTYPESTVGTLMSKLRELGRRDAADFLLKASSVFKINLDGNGQEAYASSCNSGTSYNSISSVVSR

SEQ ID NO: 39 - protein, 1870 aa, Homo sapiens
MARWIPTKRQKYGVAIYNYNASQDVELSLQIGDTVHILEMYEGWYRGYTLQNKSKKGIFPETYIHLKEATVEDLGQHETVIPGELPLVQELTSTLREWAVIWRKLYVNNKLTLFRQLQQMTYSLIEWRSQILSGTLPKDELAELKKKVTAKIDHGNRMLGLDLVVRDDNGNILDPDETSTIALFKAHEVASKRIEEKIQEEKSILQNLDLRGQSIFSTIHTYGLYVNFKNFVCNIGEDAELFMALYDPDQSTFISENYLIRWGSNGMPKEIEKLNNLQAVFTDLSSMDLIRPRVSLVCQIVRVGHMELKEGKKHTCGLRRPFGVAVMDITDIIHGKVDDEEKQHFIPFQQIAMETYIRQRQLIMSPLITSHVIGENEPLTSVLNKVIAAKEVNHKGQGLWVSLKLLPGDLTQVQKNFSHLVDRSTAIARKMGFPEIILPGDVRNDIYVTLIHGEFDKGKKKTPKNVEVTMSVHDEEGKLLEKAIHPGAGYEGISEYKSVVYYQVKQPCWYETVKVSIAIEEVTRCHIRFTFRHRSSQETRDKSERAFGVAFVKLMNPDGTTLQDGRHDLVVYKGDNKKMEDAKFYLTLPGTKMEMEEKELQASKNLVTFTPSKDSTKDSFQIATLICSTKLTQNVDLLGLLNWRSNSQNIKHNLKKLMEVDGGEIVKFLQDTLDALFNIMMEMSDSETYDFLVFDALVFIISLIGDIKFQHFNPVLETYIYKHFSATLAYVKLSKVLNFYVANADDSSKTELLFAALKALKYLFRFIIQSRVLYLRFYGQSKDGDEFNNSIRQLFLAFNMLMDRPLEEAVKIKGAALKYLPSIINDVKLVFDPVELSVLFCKFIQSIPDNQLVRQKLNCMTKIVESTLFRQSECREVLLPLLTDQLSGQLDDNSNKPDHEASSQLLSNILEVLDRKDVGATAVHIQLIMERLLRRINRTVIGMNRQSPHIGSFVACMIALLQQMDDSHYSHYISTFKTRQDIIDFLMETFIMFKDLIGKNVYAKDWMVMNMTQNRVFLRAINQFAEVLTRFFMDQASFELQLWNNYFHLAVAFLTHESLQLETFSQAKRNKIVKKYGDMRKEIGFRIRDMWYNLGPHKIKFIPSMVGPILEVTLTPEVELRKATIPIFFDMMQCEFNFSGNGNFHMFENELITKLDQEVEGGRGDEQYKVLLEKLLLEHCRKHKYLSSSGEVFALLVSSLLENLLDYRTIIMQDESKENRMSCTVNVLNFYKEKKREDIYIRYLYKLRDLHRDCENYTEAAYTLLLHAELLQWSDKPCVPHLLQKDSYYVYTQQELKEKLYQEIISYFDKGKMWEKAIKLSKELAETYESKVFDYEGLGNLLKKRASFYENIIKAMRPQPEYFAVGYYGQGFPSFLRNKIFIYRGKEYERREDFSLRLLTQFPNAEKMTSTTPPGEDIKSSPKQYMQCFTVKPVMSLPPSYKDKPVPEQILNYYRANEVQQFRYSRPFRKGEKDPDNEFATMWIERTTYTTAYTFPGILKWFEVKQISTEEISPLENAIETMELTNERISNCVQQHAWDRSLSVHPLSMLLSGIVDPAVMGGFSNYEKAFFTEKYLQEHPEDQEKVELLKRLIALQMPLLTEGIRIHGEKLTEQLKPLHERLSSCFRELKEKVEKHYGVITLPPNLTERKQSRTGSIVLPYIMSSTLRRLSITSVTSSVVSTSSNSSDNAPSRPGSDGSILEPLLERRASSGARVEDLSLREENSENRISKFKRKDWSLSKSQVIAEKAPEPDLMSPTRKAQRPKSLQLMDNRLSPFHGSSPPQSTPLSPPPLTPKATRTLSSPSLQTDGIAATPVPPPPPPKSKPYEGSQRNSTELAPPLPVRREAKAPPPPPPKARKSGIPTSEPGSQ

SEQ ID NO: 40 - protein, 381 aa, Homo sapiens
MIDTLRPVPFASEMAISKTVAWLNEQLELGNERLLLMDCRPQELYESSHIESAINVAIPGIMLRRLQKGNLPVRALFTRGEDRDRFTRRCGTDTVVLYDESSSDWNENTGGESVLGLLLKKLKDEGCRAFYLEGGFSKFQAEFSLHCETNLDGSCSSSSPPLPVLGLGGLRISSDSSSDIESDLDRDPNSATDSDGSPLSNSQPSFPVEILPFLYLGCAKDSTNLDVLEEFGIKYILNVTPNLPNLFENAGEFKYKQIPISDHWSQNLSQFFPEAISFIDEARGKNCGVLVHCLAGISRSVTVTVAYLMQKLNLSMNDAYDIVKMKKSNISPNFNFMGQLLDFERTLGLSSPCDNRVPAQQLYFTTPSNQNVYQVDSLQST

SEQ ID NO: 41 - protein, 240 aa, Homo sapiens
MATDELATKLSRRLQMEGEGGGETPEQPGLNGAAAAAAGAPDEAAEALGSADCELSAKLLRRADLNQGIGEPQSPSRRVFNPYTEFKEFSRKQIKDMEKMFKQYDAGRDGFIDLMELKLMMEKLGAPQTHLGLKNMIKEVDEDFDSKLSFREFLLIFRKAAAGELQEDSGLCVLARLSEIDVSSEGVKGAKSFFEAKVQAINVSSRFEEEIKAEQEERKKQAEEMKQRKAAFKELQSTFK

SEQ ID NO: 42 - protein, 1053 aa, Homo sapiens
MWQPRRPWPRVPWRWALALLALVGAGLCHAGPQPGYPARPSARNKNWCAYIVNKNVSCSVLEGSESFIQAQYNCAWNQMPCPSALVYRVNFRPRYVTRYKTVTQLEWRCCPGFRGGDCQEGPKDPVKTLRPTPARPRNSLKKATDNEPSQFSEPRKTLSPTGTAQPSWGVDPKEGPQELQEKKIQVLEEKVLRLTRTVLDLQSSLAGVSENLKHATQDDASRTRAPGLSSQHPKPDTTVSGDTETGQSPGVFNTKESGMKDIKSELAEVKDTLKNKSDKLEELDGKVKGYEGQLRQLQEAAQGPTVTMTTNELYQAYVDSKIDALREELMEGMDRKLADLKNSCEYKLTGLQQQCDDYGSSYLGVIELIGEKETSLRKEINNLRARLQEPSAQANCCDSEKNGDIGQQIKTLDQKIERVAEATRMLNGRLDNEFDRLIVPEPDVDFDAKWNELDARINVTEKNAEEHCFYIEETLRGAINGEVGDLKQLVDQKIQSLEDRLGSVLLQMTNNTGAELSPPGAAALPGVSGSGDERVMMELNHLKDKVQVVEDICLLNIQGKPHGMEGALPNREDRAVRDSLHLLKSLNDTMHRKFQETEQTIQKLQQDFSFLYSQLNHTENDVTHLQKEMSNCRAGENAGMGRFTKVGEQERTVDTLPSPQHPVAHCCSQLEERWQRLQSQVISELDACKECTQGVQREVSMVEGRVSHMEKTCSKLDSISGNLQRIKEGLNKHVSSLWNCVRQMNGTLRSHSRDISGLKNSVQQFYSHVFQISTDLQDLVKFQPSAKAPSPPPPAEAPKEPLQPEPAPPRPSGPATAEDPGRRPVLPQRPPEERPPQPPGSTGVIAETGQAGPPAGAGVSGRGLPRGVDGQTGSGTVPGAEGFAGAPGYPKSPPVASPGAPVPSLVSFSAGLTQKPFPSDGGVVLFNKVLVNDGDVYNPSTGVFTAPYDGRYLITATLTPERDAYVEAVLSVSNASVAQLHTAGYRREFLEYHRPPGALHTCGGPGAFHLIVHLKAGDAVNVVVTGGKLAHTDFDEMYSTFSGVFLYPFLSHL

SEQ ID NO: 43 - protein, 434 aa, Homo sapiens
MSILKIHAREIFDSRGNPTVEVDLFTSKGLFRAAVPSGASTGIYEALELRDNDKTRYMGKGVSKAVEHINKTIAPALVSKKLNVTEQEKIDKLMIEMDGTENKSKFGANAILGVSLAVCKAGAVEKGVPLYRHIADLAGNSEVILPVPAFNVINGGSHAGNKLAMQEFMILPVGAANFREAMRIGAEVYHNLKNVIKEKYGKDATNVGDEGGFAPNILENKEGLELLKTAIGKAGYTDKVVIGMDVAASEFFRSGKYDLDFKSPDDPSRYISPDQLADLYKSFIKDYPVVSIEDPFDQDDWGAWQKFTASAGIQVVGDDLTVTNPKRIAKAVNEKSCNCLLLKVNQIGSVTESLQACKLAQANGWGVMVSHRSGETEDTFIADLVVGLCTGQIKTGAPCRSERLAKYNQLLRIEEELGSKAKFAGRNFRNPLAK

SEQ ID NO: 44 - protein, 475 aa, Homo sapiens
MEMASSAGSWLSGCLIPLVFLRLSVHVSGHAGDAGKFHVALLGGTAELLCPLSLWPGTVPKEVRWLRSPFPQRSQAVHIFRDGKDQDEDLMPEYKGRTVLVRDAQEGSVTLQILDVRLEDQGSYRCLIQVGNLSKEDTVILQVAAPSVGSLSPSAVALAVILPVLVLLIMVCLCLIWKQRRAKEKLLYEHVTEVDNLLSDHAKEKGKLHKAVKKLRSELKLKRAAANSGWRRARLHFVAVTLDPDTAHPKLILSEDQRCVRLGDRRQPVPDNPQRFDFVVSILGSEYFTTGCHYWEVYVGDKTKWILGVCSESVSRKGKVTASPANGHWLLRQSRGNEYEALTSPQTSFRLKEPPRCVGIFLDYEAGVISFYNVTNKSHIFTFTHNFSGPLRPFFEPCLHDGGKNTAPLVICSELHKSEESIVPRPEGKGHANGDVSLKVNSSLLPPKAPELKDIILSLPPDLGPALQELKAPSF

SEQ ID NO: 45 - protein, 356 aa, Homo sapiens
MAATRSPTRARERERSGAPAAGSDQVHSWMLATSQALDTVWRMAKGFVMLAVSFLVAAICYFRRLHLYSGHKLKWWIGYLQRKFKRNLSVEAEVDLLSYCAREWKGETPRNKLMRKAYEELFWRHHIKCVRQVRRDNYDALRSVLFQIFSQGISFPSWMKEKDIVKLPEKLLFSQGCNWIQQYSFGPEKYTGSNVFGKLRKYVELLKTQWTEFNGIRDYHKRGSMCNTLFSDAILEYKLYEALKFIMLYQVTEVYEQMKTKKVIPSLFRLLFSRETSSDPLSFMMNHLNSVGDTCGLEQIDMFILGYSLEVKIKVFRLFKFNSRDFEVCYPEEPLRDWPEISLLTENDRHYHIPVF

SEQ ID NO: 46 - protein, 691 aa, Homo sapiens
MAPFPEEVDVFTAPHWRMKQLVGLYCDKLSKTNFSNNNDFRALLQSLYATFKEFKMHEQIENEYIIGLLQQRSQTIYNVHSDNKLSEMLSLFEKGLKNVKNEYEQLNYAKQLKERLEAFTRDFLPHMKEEEEVFQPMLMEYFTYEELKDIKKKVIAQHCSQKDTAELLRGLSLWNHAEERQKFFKYSVDEKSDKEAEVSEHSTGITHLPPEVMLSIFSYLNPQELCRCSQVSMKWSQLTKTGSLWKHLYPVHWARGDWYSGPATELDTEPDDEWVKNRKDESRAFHEWDEDADIDESEESAEESIAISIAQMEKRLLHGLIHNVLPYVGTSVKTLVLAYSSAVSSKMVRQILELCPNLEHLDLTQTDISDSAFDSWSWLGCCQSLRHLDLSGCEKITDVALEKISRALGILTSHQSGFLKTSTSKITSTAWKNKDITMQSTKQYACLHDLTNKGIGEEIDNEHPWTKPVSSENFTSPYVWMLDAEDLADIEDTVEWRHRNVESLCVMETASNFSCSTSGCFSKDIVGLRTSVCWQQHCASPAFAYCGHSFCCTGTALRTMSSLPESSAMCRKAARTRLPRGKDLIYFGSEKSDQETGRVLLFLSLSGCYQITDHGLRVLTLGGGLPYLEHLNLSGCLTITGAGLQDLVSACPSLNDEYFYYCDNINGPHADTASGCQNLQCGFRACCRSGE

SEQ ID NO: 47 - protein, 365 aa, Homo sapiens
MGVPRPQPWALGLLLFLLPGSLGAESHLSLLYHLTAVSSPAPGTPAFWVSGWLGPQQYLSYNSLRGEAEPCGAWVWENQVSWYWEKETTDLRIKEKLFLEAFKALGGKGPYTLQGLLGCELGPDNTSVPTAKFALNGEEFMNFDLKQGTWGGDWPEALAISQRWQQQDKAANKELTFLLFSCPHRLREHLERGRGNLEWKEPPSMRLKARPSSPGFSVLTCSAFSFYPPELQLRFLRNGLAAGTGQGDFGPNSDGSFHASSSLTVKSGDEHHYCCIVQHAGLAQPLRVELESPAKSSVLVVGIVIGVLLLTAAAVGGALLWRRMRSGLPAPWISLRGDDTGVLLPTPGEAQDADLKDVNVIPATA

SEQ ID NO: 48 - protein, 526 aa, Homo sapiens
MVNEGPNQEESDDTPVPESALQADPSVSVHPSVSVHPSVSINPSVSVHPSSSAHPSALAQPSGLAHPSSSGPEDLSVIKVSRRRWAVVLVFSCYSMCNSFQWIQYGSINNIFMHFYGVSAFAIDWLSMCYMLTYIPLLLPVAWLLEKFGLRTIALTGSALNCLGAWVKLGSLKPHLFPVTVVGQLICSVAQVFILGMPSRIASVWFGANEVSTACSVAVFGNQLGIAIGFLVPPVLVPNIEDRDELAYHISIMFYIIGGVATLLLILVIIVFKEKPKYPPSRAQSLSYALTSPDASYLGSIARLFKNLNFVLLVITYGLNAGAFYALSTLLNRMVIWHYPGEEVNAGRIGLTIVIAGMLGAVISGIWLDRSKTYKETTLVVYIMTLVGMVVYTFTLNLGHLWVVFITAGTMGFFMTGYLPLGFEFAVELTYPESEGISSGLLNISAQVFGIIFTISQGQIIDNYGTKPGNIFLCVFLTLGAALTAFIKADLRRQKANKETLENKLQEEEEESNTSKVPTAVSEDHL

SEQ ID NO: 49 - protein, 647 aa, Homo sapiens
MAEEEAPKKSRAAGGGASWELCAGALSARLAEEGSGDAGGRRRPPVDPRRLARQLLLLLWLLEAPLLLGVRAQAAGQGPGQGPGPGQQPPPPPQQQQSGQQYNGERGISVPDHGYCQPISIPLCTDIAYNQTIMPNLLGHTNQEDAGLEVHQFYPLVKVQCSAELKFFLCSMYAPVCTVLEQALPPCRSLCERARQGCEALMNKFGFQWPDTLKCEKFPVHGAGELCVGQNTSDKGTPTPSLLPEFWTSNPQHGGGGHRGGFPGGAGASERGKFSCPRALKVPSYLNYHFLGEKDCGAPCEPTKVYGLMYFGPEELRFSRTWIGIWSVLCCASTLFTVLTYLVDMRRFSYPERPIIFLSGCYTAVAVAYIAGFLLEDRVVCNDKFAEDGARTVAQGTKKEGCTILFMMLYFFSMASSIWWVILSLTWFLAAGMKWGHEAIEANSQYFHLAAWAVPAIKTITILALGQVDGDVLSGVCFVGLNNVDALRGFVLAPLFVYLFIGTSFLLAGFVSLFRIRTIMKHDGTKTEKLEKLMVRIGVFSVLYTVPATIVIACYFYEQAFRDQWERSWVAQSCKSYAIPCPHLQAGGGAPPHPPMSPDFTVFMIKYLMTLIVGITSGFWIWSGKTLNSWRKFYTRLTNSKQGETTV

SEQ ID NO: 50 - protein, 952 aa, Homo sapiens
MGVRHPPCSHRLLAVCALVSLATAALLGHILLHDFLLVPRELSGSSPVLEETHPAHQQGASRPGPRDAQAHPGRPRAVPTQCDVPPNSRFDCAPDKAITQEQCEARGCCYIPAKQGLQGAQMGQPWCFFPPSYPSYKLENLSSSEMGYTATLTRTTPTFFPKDILTLRLDVMMETENRLHFTIKDPANRRYEVPLETPHVHSRAPSPLYSVEFSEEPFGVIVRRQLDGRVLLNTTVAPLFFADQFLQLSTSLPSQYITGLAEHLSPLMLSTSWTRITLWNRDLAPTPGANLYGSHPFYLALEDGGSAHGVFLLNSNAMDVVLQPSPALSWRSTGGILDVYIFLGPEPKSVVQQYLDVVGYPFMPPYWGLGFHLCRWGYSSTAITRQVVENMTRAHFPLDVQWNDLDYMDSRRDFTFNKDGFRDFPAMVQELHQGGRRYMMIVDPAISSSGPAGSYRPYDEGLRRGVFITNETGQPLIGKVWPGSTAFPDFTNPTALAWWEDMVAEFHDQVPFDGMWIDMNEPSNFIRGSEDGCPNNELENPPYVPGVVGGTLQAATICASSHQFLSTHYNLHNLYGLTEAIASHRALVKARGTRPFVISRSTFAGHGRYAGHWTGDVWSSWEQLASSVPEILQFNLLGVPLVGADVCGFLGNTSEELCVRWTQLGAFYPFMRNHNSLLSLPQEPYSFSEPAQQAMRKALTLRYALLPHLYTLFHQAHVAGETVARPLFLEFPKDSSTWTVDHQLLWGEALLITPVLQAGKAEVTGYFPLGTWYDLQTVPVEALGSLPPPPAAPREPAIHSEGQWVTLPAPLDTINVHLRAGYIIPLQGPGLTTTESRQQPMALAVALTKGGEARGELFWDDGESLEVLERGAYTQVIFLARNNTIVNELVRVTSEGAGLQLQKVTVLGVATAPQQVLSNGVPVSNFTYSPDTKVLDICVSLLMGEQFLVSWC

SEQ ID NO: 51 - protein, 146 aa, Homo sapiens
MKFQYKEDHPFEYRKKEGEKIRKKYPDRVPVIVEKAPKARVPDLDKRKYLVPSDLTVGQFYFLIRKRIHLRPEDALFFFVNNTIPPTSATMGQLYEVMVLVAQYWMPSSAVWHPLALVLDALITHLRSGAEGVIYPDPLTYGSVRL

SEQ ID NO: 52 - protein, 336 aa, Homo sapiens
MSNMENSFDDVSCLSPQNLGSSSPSKKQSKENTITINCVTFPHPDTMPEQQLLKPTEWSYCDYFWADKKDPQGNGTVAGFELLLQKQLKGKQMQKEMSEFIRERIKIEEDYAKNLAKLSQNSLASQEEGSLGEAWAQVKKSLADEAEVHLKFSAKLHSEVEKPLMNFRENFKKDMKKCDHHIADLRKQLASRYASVEKARKALTERQRDLEMKTQQLEIKLSNKTEEDIKKARRKSTQAGDDLMRCVDLYNQAQSKWFEEMVTTTLELERLEVERVEMIRQHLCQYTQLRHETDMFNQSTVEPVDQLLRKVDPAKDRELWVREHKTGNIRPVDMEI

SEQ ID NO: 53 - protein, 429 aa, Homo sapiens
MQLRNPELHLGCALALRFLALVSWDIPGARALDNGLARTPTMGWLHWERFMCNLDCQEEPDSCISEKLFMEMAELMVSEGWKDAGYEYLCIDDCWMAPQRDSEGRLQADPQRFPHGIRQLANYVHSKGLKLGIYADVGNKTCAGFPGSFGYYDIDAQTFADWGVDLLKFDGCYCDSLENLADGYKHMSLALNRTGRSIVYSCEWPLYMWPFQKPNYTEIRQYCNHWRNFADIDDSWKSIKSILDWTSFNQERIVDVAGPGGWNDPDMLVIGNFGLSWNQQVTQMALWAIMAAPLFMSNDLRHISPQAKALLQDKDVIAINQDPLGKQGYQLRQGDNFEVWERPLSGLAWAVAMINRQEIGGPRSYTIAVASLGKGVACNPACFITQLLPVKRKLGFYEWTSRLRSHINPTGTVLLQLENTMQMSLKDLL

SEQ ID NO: 54 - protein, 354 aa, Homo sapiens
MGCTLSAEERAALERSKAIEKNLKEDGISAAKDVKLLLLGAGESGKSTIVKQMKIIHEDGFSGEDVKQYKPVVYSNTIQSLAAIVRAMDTLGIEYGDKERKADAKMVCDVVSRMEDTEPFSAELLSAMMRLWGDSGIQECFNRSREYQLNDSAKYYLDSLDRIGAADYQPTEQDILRTRVKTTGIVETHFTFKNLHFRLFDVGGQRSERKKWIHCFEDVTAIIFCVALSGYDQVLHEDETTNRMHESLMLFDSICNNKFFIDTSIILFLNKKDLFGEKIKKSPLTICFPEYTGPNTYEDAAAYIQAQFESKNRSPNKEIYCHMTCATDTNNIQVVFDAVTDIIIANNLRGCGLY

SEQ ID NO: 55 - protein, 552 aa, Homo sapiens
MRLLPLAPGRLRRGSPRHLPSCSPALLLLVLGGCLGVFGVAAGTRRPNVVLLLTDDQDEVLGGMTPLKKTKALIGEMGMTFSSAYVPSALCCPSRASILTGKYPHNHHVVNNTLEGNCSSKSWQKIQEPNTFPAILRSMCGYQTFFAGKYLNEYGAPDAGGLEHVPLGWSYWYALEKNSKYYNYTLSINGKARKHGENYSVDYLTDVLANVSLDFLDYKSNFEPFFMMIATPAPHSPWTAAPQYQKAFQNVFAPRNKNFNIHGTNKHWLIRQAKTPMTNSSIQFLDNAFRKRWQTLLSVDDLVEKLVKRLEFTGELNNTYIFYTSDNGYHTGQFSLPIDKRQLYEFDIKVPLLVRGPGIKPNQTSKMLVANIDLGPTILDIAGYDLNKTQMDGMSLLPILRGASNLTWRSDVLVEYQGEGRNVTDPTCPSLSPGVSQCFPDCVCEDAYNNTYACVRTMSALWNLQYCEFDDQEVFVEVYNLTADPDQITNIAKTIDPELLGKMNYRLMMLQSCSGPTCRTPGVFDPGYRFDPRLMFSNRGSVRTRRFSKHLL

SEQ ID NO: 56 - protein, 593 aa, Homo sapiens
MWTLVSWVALTAGLVAGTRCPDGQFCPVACCLDPGGASYSCCRPLLDKWPTTLSRHLGGPCQVDAHCSAGHSCIFTVSGTSSCCPFPEAVACGDGHHCCPRGFHCSADGRSCFQRSGNNSVGAIQCPDSQFECPDFSTCCVMVDGSWGCCPMPQASCCEDRVHCCPHGAFCDLVHTRCITPTGTHPLAKKLPAQRTNRAVALSSSVMCPDARSRCPDGSTCCELPSGKYGCCPMPNATCCSDHLHCCPQDTVCDLIQSKCLSKENATTDLLTKLPAHTVGDVKCDMEVSCPDGYTCCRLQSGAWGCCPFTQAVCCEDHIHCCPAGFTCDTQKGTCEQGPHQVPWMEKAPAHLSLPDPQALKRDVPCDNVSSCPSSDTCCQLTSGEWGCCPIPEAVCCSDHQHCCPQGYTCVAEGQCQRGSEIVAGLEKMPARRASLSHPRDIGCDQHTSCPVGQTCCPSLGGSWACCQLPHAVCCEDRQHCCPAGYTCNVKARSCEKEVVSAQPATFLARSPHVGVKDVECGEGHFCHDNQTCCRDNRQGWACCPYRQGVCCADRRHCCPAGFRCAARGTKCLRREAPRWDAPLRDPALRQLL

SEQ ID NO: 57 - protein, 369 aa, Homo sapiens
MSSRGGKKKSTKTSRSAKAGVIFPVGRMLRYIKKGHPKYRIGVGAPVYMAAVLEYLTAEILELAGNAARDNKKGRVTPRHILLAVANDEELNQLLKGVTIASGGVLPNIHPELLAKKRGSKGKLEAIITPPPAKKAKSPSQKKPVSKKAGGKKGARKSKKKQGEVSKAASADSTTEGTPADGFTVLSTKSLFLGQKLQVVQADIASIDSDAVVHPTNTDFYIGGEVGNTLEKKGGKEFVEAVLELRKKNGPLEVAGAAVSAGHGLPAKFVIHCNSPVWGADKCEELLEKTVKNCLALADDKKLKSIAFPSIGSGRNGFPKQTAAQLILKAISSYFVSTMSSSIKTVYFVLFDSESIGIYVQEMAKLDAN

SEQ ID NO: 58 - protein, 208 aa, Homo sapiens
MKLLPSVVLKLFLAAVLSALVTGESLERLRRGLAAGTSNPDPPTVSTDQLLPLGGGRDRKVRDLQEADLDLLRVTLSSKPQALATPNKEEHGKRKKKGKGLGKKRDPCLRKYKDFCIHGECKYVKELRAPSCICHPGYHGERCHGLSLPVENRLYTYDHTTILAVVAVVLSSVCLLVIVGLLMFRYHRRGGYDVENEEKVKLGMTNSH

SEQ ID NO: 59 - protein, 556 aa, Homo sapiens
MELCGLGLPRPPMLLALLLATLLAAMLALLTQVALVVQVAEAARAPSVSAKPGPALWPLPLLVKMTPNLLHLAPENFYISHSPNSTAGPSCTLLEEAFRRYHGYIFGFYKWHHEPAEFQAKTQVQQLLVSITLQSECDAFPNISSDESYTLLVKEPVAVLKANRVWGALRGLETFSQLVYQDSYGTFTINESTIIDSPRFSHRGILIDTSRHYLPVKIILKTLDAMAFNKFNVLHWHIVDDQSFPYQSITFPELSNKGSYSLSHVYTPNDVRMVIEYARLRGIRVLPEFDTPGHTLSWGKGQKDLLTPCYSRQNKLDSFGPINPTLNTTYSFLTTFFKEISEVFPDQFIHLGGDEVEFKCWESNPKIQDFMRQKGFGTDFKKLESFYIQKVLDIIATINKGSIVWQEVFDDKAKLAPGTIVEVWKDSAYPEELSRVTASGFPVILSAPWYLDLISYGQDWRKYYKVEPLDFGGTQKQKQLFIGGEACLWGEYVDATNLTPRLWPRASAVGERLWSSKDVRDMDDAYDRLTRHRCRMVERGIAAQPLYAGYCNHENM

SEQ ID NO: 60 - protein, 288 aa, Homo sapiens
MERPQPDSMPQDLSEALKEATKEVHTQAENAEFMRNFQKGQVTRDGFKLVMASLYHIYVALEEEIERNKESPVFAPVYFPEELHRKAALEQDLAFWYGPRWQEVIPYTPAMQRYVKRLHEVGRTEPELLVAHAYTRYLGDLSGGQVLKKIAQKALDLPSSGEGLAFFTFPNIASATKFKQLYRSRMNSLEMTPAVRQRVIEEAKTAFLLNIQLFEELQELLTHDTKDQSPSRAPGLRQRASNKVQDSAPVETPRGKPPLNTRSQAPLLRWVLTLSFLVATVAVGLYAM

SEQ ID NO: 61 - protein, 543 aa, Homo sapiens
MLLRSKPALPPPLMLLLLGPLGPLSPGALPRPAQAQDVVDLDFFTQEPLHLVSPSFLSVTIDANLATDPRFLILLGSPKLRTLARGLSPAYLRFGGTKTDFLIFDPKKESTFEERSYWQSQVNQDICKYGSIPPDVEEKLRLEWPYQEQLLLREHYQKKFKNSTYSRSSVDVLYTFANCSGLDLIFGLNALLRTADLQWNSSNAQLLLDYCSSKGYNISWELGNEPNSFLKKADIFINGSQLGEDFIQLHKLLRKSTFKNAKLYGPDVGQPRRKTAKMLKSFLKAGGEVIDSVTWHHYYLNGRTATKEDFLNPDVLDIFISSVQKVFQVVESTRPGKKVWLGETSSAYGGGAPLLSDTFAAGFMWLDKLGLSARMGIEVVMRQVFFGAGNYHLVDENFDPLPDYWLSLLFKKLVGTKVLMASVQGSKRRKLRVYLHCTNTDNPRYKEGDLTLYAINLHNVTKYLRLPYPFSNKQVDKYLLRPLGPHGLLSKSVQLNGLTLKMVDDQTLPPLMEKPLRPGSSLGLPAFSYSFFVIRNAKVAACI

SEQ ID NO: 62 - protein, 76 aa, Homo sapiens
MAETDPKTVQDLTSVVQTLLQQMQDKFQTMSDQIIGRIDDMSSRIDDLEKNIADLMTQAGVEELESENKIPATQKS

SEQ ID NO: 63 - protein, 532 aa, Homo sapiens
MAPSSPRPALPALLVLLGALFPGPGNAQTSVSPSKVILPRGGSVLVTCSTSCDQPKLLGIETPLPKKELLLPGNNRKVYELSNVQEDSQPMCYSNCPDGQSTAKTFLTVYWTPERVELAPLPSWQPVGKNLTLRCQVEGGAPRANLTVVLLRGEKELKREPAVGEPAEVTTTVLVRRDHHGANFSCRTELDLRPQGLELFENTSAPYQLQTFVLPATPPQLVSPRVLEVDTQGTVVCSLDGLFPVSEAQVHLALGDQRLNPTVTYGNDSFSAKASVSVTAEDEGTQRLTCAVILGNQSQETLQTVTIYSFPAPNVILTKPEVSEGTEVTVKCEAHPRAKVTLNGVPAQPLGPRAQLLLKATPEDNGRSFSCSATLEVAGQLIHKNQTRELRVLYGPRLDERDCPGNWTWPENSQQTPMCQAWGNPLPELKCLKDGTFPLPIGESVTVTRDLEGTYLCRARSTQGEVTRKVTVNVLSPRYEIVIITVVAAAVIMGTAGLSTYLYNRQRKIKKYRLQQAQKGTPMKPNTQATPP

SEQ ID NO: 64 - protein, 134 aa, Homo sapiens
MKAFSPVRSVRKNSLSDHSLGISRSKTPVDDPMSLLYNMNDCYSKLKELVPSIPQNKKVSKMEILQHVIDYILDLQIALDSHPTIVSLHHQRPGQNQASRTPLTTLNTDISILSLQASEFPSELMSNDSKALCG

SEQ ID NO: 65 - protein, 866 aa, Homo sapiens
MGAARSPPSAVPGPLLGLLLLLLGVLAPGGASLRLLDHRALVCSQPGLNCTVKNSTCLDDSWIHPRNLTPSSPKDLQIQLHFAHTQQGDLFPVAHIEWTLQTDASILYLEGAELSVLQLNTNERLCVRFEFLSKLRHHHRRWRFTFSHFVVDPDQEYEVTVHHLPKPIPDGDPNHQSKNFLVPDCEHARMKVTTPCMSSGSLWDPNITVETLEAHQLRVSFTLWNESTHYQILLTSFPHMENHSCFEHMHHIPAPRPEEFHQRSNVTLTLRNLKGCCRHQVQIQPFFSSCLNDCLRHSATVSCPEMPDTPEPIPDYMPLWVYWFITGISILLVGSVILLIVCMTWRLAGPGSEKYSDDTKYTDGLPAADLIPPPLKPRKVWIIYSADHPLYVDVVLKFAQFLLTACGTEVALDLLEEQAISEAGVMTWVGRQKQEMVESNSKIIVLCSRGTRAKWQALLGRGAPVRLRCDHGKPVGDLFTAAMNMILPDFKRPACFGTYVVCYFSEVSCDGDVPDLFGAAPRYPLMDRFEEVYFRIQDLEMFQPGRMHRVGELSGDNYLRSPGGRQLRAALDRFRDWQVRCPDWFECENLYSADDQDAPSLDEEVFEEPLLPPGTGIVKRAPLVREPGSQACLAIDPLVGEEGGAAVAKLEPHLQPRGQPAPQPLHTLVLAAEEGALVAAVEPGPLADGAAVRLALAGEGEACPLLGSPGAGRNSVLFLPVDPEDSPLGSSTPMASPDLLPEDVREHLEGLMLSLFEQSLSCQAQGGCSRPAMVLTDPHTPYEEEQRQSVQSDQGYISRSSPQPPEGLTEMEEEEEEEQDPGKPALPLSPEDLESLRSLQRQLLFRQLQKNSGWDTMGSESEGPSA

SEQ ID NO: 66 - protein, 288 aa, Homo sapiens
MKPSGEDQAALAAGPWEECFQAAVQLALRAGQIIRKALTEEKRVSTKTSAADLVTETDHLVEDLIISELRERFPSHRFIAEEAAASGAKCVLTHSPTWIIDPIDGTCNFVHRFPTVAVSIGFAVRQELEFGVIYHCTEERLYTGRRGRGAFCNGQRLRVSGETDLSKALVLTEIGPKRDPATLKLFLSNMERLLHAKAHGVRVIGSSTLALCHLASGAADAYYQFGLHCWDLAAATVIIREAGGIVIDTSGGPLDLMACRVVAASTREMAMLIAQALQTINYGRDDEK

SEQ ID NO: 67 - protein, 596 aa, Homo sapiens
MAGNCGARGALSAHTLLFDLPPALLGELCAVLDSCDGALGWRGLAERLSSSWLDVRHIEKYVDQGKSGTRELLWSWAQKNKTIGDLLQVLQEMGHRRAIHLITNYGAVLSPSEKSYQEGGFPNILFKETANVTVDNVLIPEHNEKGILLKSSISFQNIIEGTRNFHKDFLIGEGEIFEVYRVEIQNLTYAVKLFKQEKKMQCKKHWKRFLSELEVLLLFHHPNILELAAYFTETEKFCLIYPYMRNGTLFDRLQCVGDTAPLPWHIRIGILIGISKAIHYLHNVQPCSVICGSISSANILLDDQFQPKLTDFAMAHFRSHLEHQSCTINMTSSSSKHLWYMPEEYIRQGKLSIKTDVYSFGIVIMEVLTGCRVVLDDPKHIQLRDLLRELMEKRGLDSCLSFLDKKVPPCPRNFSAKLFCLAGRCAATRAKLRPSMDEVLNTLESTQASLYFAEDPPTSLKSFRCPSPLFLENVPSIPVEDDESQNNNLLPSDEGLRIDRMTQKTPFECSQSEVMFLSLDKKPESKRNEEACNMPSSSCEESWFPKYIVPSQDLRPYKVNIDPSSEAPGHSCRSRPVESSCSSKFSWDEYEQYKKE

SEQ ID NO: 68 - protein, 411 aa, Homo sapiens
METPEVPVGSLIDFGPEAPTSSPLEAPPPVLQDGDGSLGDGASESETTESADSENDMGESPSHPSWDQDRRSSSNESFSSNQSTESTQDEETLALRDFMRGYVEKIFSGGEDLDQEEKAKFGEYCSSENGKGREWFARYVSAQRCNSKCVSEATFYRLVQSFAVVLFECHQMDDFGPAKNLMTMCFTYYHIGKPQLLPPESREKPAGSIDSYLKSANSWLAEKKDIAERLLKNTSARTENVKGFFGGLETKLKGPLARRNEEDENKPQEKRPRAVTAYSPEDEKKGEKIYLYTHLKQQPIWHTLRFWNAAFFDAVHCERTKRSPTTRGDAGEEEEKREKWCHMTQEERDDSLRFNENITFGQLGTFTHNMLAFGLNKKLCNDFLKKQAVIGNLDEEQYKLLSDHIEQMATE

SEQ ID NO: 69 - protein, 480 aa, Homo sapiens
MLNFGASLQQTAEERMEMISERPKESMYSWNKTAEKSDFEAVEALMSMSCSWKSDFKKYVENRPVTPVSDLSEEENLLPGTPDFHTIPAFCLTPPYSPSDFEPSQVSNLMAPAPSTVHFKSLSDTAKPHIAAPFKEEEKSPVSAPKLPKAQATSVIRHTADAQLCNHQTCPMKAASILNYQNNSFRRRTHLNVEAARKNIPCAAVSPNRSKCERNTVADVDEKASAALYDFSVPSSETVICRSQPAPVSPQQKSVLVSPPAVSAGGVPPMPVICQMVPLPANNPVVTTVVPSTPPSQPPAVCPPVVFMGTQVPKGAVMFVVPQPVVQSSKPPVVSPNGTRLSPIAPAPGFSPSAAKVTPQIDSSRIRSHICSHPGCGKTYFKSSHLKAHTRTHTGEKPFSCSWKGCERRFARSDELSRHRRTHTGEKKFACPMCDRRFMRSDHLTKHARRHLSAKKLPNWQMEVSKLNDIALPPTPAPTQ

SEQ ID NO: 70 - protein, 410 aa, Homo sapiens
MVCFRLFPVPGSGLVLVCLVLGAVRSYALELNLTDSENATCLYAKWQMNFTVRYETTNKTYKTVTISDHGTVTYNGSICGDDQNGPKIAVQFGPGFSWIANFTKAASTYSIDSVSFSYNTGDNTTFPDAEDKGILTVDELLAIRIPLNDLFRCNSLSTLEKNDVVQHYWDVLVQAFVQNGTVSTNEFLCDKDKTSTVAPTIHTTVPSPTTTPTPKEKPEAGTYSVNNGNDTCLLATMGLQLNITQDKVASVININPNTTHSTGSCRSHTALLRLNSSTIKYLDFVFAVKNENRFYLKEVNISMYLVNGSVFSIANNNLSYWDAPLGSSYMCNKEQTVSVSGAFQINTFDLRVQPFNVTQGKYSTAQDCSADDDNFLVPIAVGAALAGVLILVLLAYFIGLKHHHAGYEQF

SEQ ID NO: 71 - protein, 131 aa, Homo sapiens
MAGVKALVALSFSGAIGLTFLMLGCALEDYGVYWPLFVLIFHAISPIPHFIAKRVTYDSDATSSACRELAYFFTTGIVVSAFGFPVILARVAVIKWGACGLVLAGNAVIFLTIQGFFLIFGRGDDFSWEQW

SEQ ID NO: 72 - protein, 132 aa, Homo sapiens
MTGELEVKNMDMKPGSTLKITGSIADGTDGFVINLGQGTDKLNLHFNPRFSESTIVCNSLDGSNWGQEQREDHLCFSPGSEVKFTVTFESDKFKVKLPDGHELTFPNRLGHSHLSYLSVRGGFNMSSFKLKE

SEQ ID NO: 73 - protein, 664 aa, Homo sapiens
METPSQRRATRSGAQASSTPLSPTRITRLQEKEDLQELNDRLAVYIDRVRSLETENAGLRLRITESEEVVSREVSGIKAAYEAELGDARKTLDSVAKERARLQLELSKVREEFKELKARNTKKEGDLIAAQARLKDLEALLNSKEAALSTALSEKRTLEGELHDLRGQVAKLEAALGEAKKQLQDEMLRRVDAENRLQTMKEELDFQKNIYSEELRETKRRHETRLVEIDNGKQREFESRLADALQELRAQHEDQVEQYKKELEKTYSAKLDNARQSAERNSNLVGAAHEELQQSRIRIDSLSAQLSQLQKQLAAKEAKLRDLEDSLARERDTSRRLLAEKEREMAEMRARMQQQLDEYQELLDIKLALDMEIHAYRKLLEGEEERLRLSPSPTSQRSRGRASSHSSQTQGGGSVTKKRKLESTESRSSFSQHARTSGRVAVEEVDEEGKFVRLRNKSNEDQSMGNWQIKRQNGDDPLLTYRFPPKFTLKAGQVVTIWAAGAGATHSPPTDLVWKAQNTWGCGNSLRTALINSTGEEVAMRKLVRSVTVVEDDEDEDGDDLLHHHHGSHCSSSGDPAEYNLRSRTVLCGTCGQPADKASASGSGAQVGGPISSGSSASSVTVTRSYRSVGGSGGGSFGDNLVTRSYLLGNSSPRTQSPQNCSIM

SEQ ID NO: 74 - protein, 357 aa, Homo sapiens
MAPRRVRSFLRGLPALLLLLLFLGPWPAASHGGKYSREKNQPKPSPKRESGEEFRMEKLNQLWEKAQRLHLPPVRLAELHADLKIQERDELAWKKLKLDGLDEDGEKEARLIRNLNVILAKYGLDGKKDARQVTSNSLSGTQEDGLDDPRLEKLWHKAKTSGKFSGEELDKLWREFLHHKEKVHEYNVLLETLSRTEEIHENVISPSDLSDIKGSVLHSRHTELKEKLRSINQGLDRLRRVSHQGYSTEAEFEEPRVIDLWDLAQSANLTDKELEAFREELKHFEAKIEKHNHYQKQLEIAHEKLRHAESVGDGERVSRSREKHALLEGRTKELGYTVKKHLQDLSGRISRARHNEL

SEQ ID NO: 75 - protein, 104 aa, Homo sapiens
MLSRNDDICIYGGLGLGGLLLLAVVLLSACLCWLHRRVKRLERSWHLLSWSQAQGSSEQELHYASLQRLPVPSSEGPDLRGRDKRGTKEDPRADYACIAENKPT

SEQ ID NO: 76 - protein, 323 aa, Homo sapiens
MAAELSMGPELPTSPLAMEYVNDFDLLKFDVKKEPLGRAERPGRPCTRLQPAGSVSSTPLSTPCSSVPSSPSFSPTEQKTHLEDLYWMASNYQQMNPEALNLTPEDAVEALIGSHPVPQPLQSFDSFRGAHHHHHHHHPHPHHAYPGAGVAHDELGPHAHPHHHHHHQASPPPSSAASPAQQLPTSHPGPGPHATASATAAGGNGSVEDRFSDDQLVSMSVRELNRHLRGFTKDEVIRLKQKRRTLKNRGYAQSCRYKRVQQKHHLENEKTQLIQQVEQLKQEVSRLARERDAYKVKCEKLANSGFREAGSTSDSPSSPEFFL

SEQ ID NO: 77 - protein, 382 aa, Homo sapiens
MDGETAEEQGGPVPPPVAPGGPGLGGAPGGRREPKKYAVTDDYQLSKQVLGLGVNGKVLECFHRRTGQKCALKLLYDSPKARQEVDHHWQASGGPHIVCILDVYENMHHGKRCLLIIMECMEGGELFSRIQERGDQAFTEREAAEIMRDIGTAIQFLHSHNIAHRDVKPENLLYTSKEKDAVLKLTDFGFAKETTQNALQTPCYTPYYVAPEVLGPEKYDKSCDMWSLGVIMYILLCGFPPFYSNTGQAISPGMKRRIRLGQYGFPNPEWSEVSEDAKQLIRLLLKTDPTERLTITQFMNHPWINQSMVVPQTPLHTARVLQEDKDHWDEVKEEMTSALATMRVDYDQVKIKDLKTSNNRLLNKRRKKQAGSSSASQGCNNQ

SEQ ID NO: 78 - protein, 350 aa, Homo sapiens
MFGLKRNAVIGLNLYCGGAGLGAGSGGATRPGGRLLATEKEASARREIGGGEAGAVIGGSAGASPPSTLTPDSRRVARPPPIGAEVPDVTATPARLLFFAPTRRAAPLEEMEAPAADAIMSPEEELDGYEPEPLGKRPAVLPLLELVGESGNNTSTDGSLPSTPPPAEEEEDELYRQSLEIISRYLREQATGAKDTKPMGRSGATSRKALETLRRVGDGVQRNHETAFQGMLRKLDIKNEDDVKSLSRVMIHVFSDGVTNWGRIVTLISFGAFVAKHLKTINQESCIEPLAESITDVLVRTKRDWLVKQRGWDGFVEFFHVEDLEGGIRNVLLAFAGVAGVGAGLAYLIR

SEQ ID NO: 79 - protein, 1124 aa, Homo sapiens
MGENEDEKQAQAGQVFENFVQASTCKGTLQAFNILTRHLDLDPLDHRNFYSKLKSKVTTWKAKALWYKLDKRGSHKEYKRGKSCTNTKCLIVGGGPCGLRTAIELAYLGAKVVVVEKRDSFSRNNVLHLWPFTIHDLRGLGAKKFYGKFCAGSIDHISIRQLQLILFKVALMLGVEIHVNVEFVKVLEPPEDQENQKIGWRAEFLPTDHSLSEFEFDVIIGADGRRNTLEGFRRKEFRGKLAIAITANFINRNSTAEAKVEEISGVAFIFNQKFFQDLKEETGIDLENIVYYKDCTHYFVMTAKKQSLLDKGVIINDYIDTEMLLCAENVNQDNLLSYAREAADFATNYQLPSLDFAMNHYGQPDVAMFDFTCMYASENAALVRERQAHQLLVALVGDSLLEPFWPMGTGCARGFLAAFDTAWMVKSWNQGTPPLELLAERESLYRLLPQTTPENINKNFEQYTLDPGTRYPNLNSHCVRPHQVKHLYITKELEHYPLERLGSVRRSVNLSRKESDIRPSKLLTWCQQQTEGYQHVNVTDLTTSWRSGLALCAIIHRFRPELINFDSLNEDDAVENNQLAFDVAEREFGIPPVTTGKEMASAQEPDKLSMVMYLSKFYELFRGTPLRPVDSWRKNYGENADLSLAKSSISNNYLNLTFPRKRTPRVDGQTGENDMNKRRRKGFTNLDEPSNFSSRSLGSNQECGSSKEGGNQNKVKSMANQLLAKFEESTRNPSLMKQERRVSGIGKPVLCSSSGPPVHSCCPKPEEATPSPSPPLKRQFPSVVVTGHVLRELKQVSAGSECLSRPWRARAKSDLQLGGTENFATLPSTRPRAQALSGVLWRLQQVEEKILQKRAQNLANREFHTKNIKEKAAHLASMFGHGDFPQNKLLSKGLSHTHPPSPPSRLPSPDPAASSSPSTVDSASPARKEKKSPSGFHFHPSHLRTVHPQLTVGKVSSGIGAAAEVLVNLYMNDHRPKAQATSPDLESMRKSFPLNLGGSDTCYFCKKRVYVMERLSAEGHFFHRECFRCSICATTLRLAAYTFDCDEGKFYCKPHFIHCKTNSKQRKRRAELKQQREEEATWQEQEAPRRDTPTESSCAVAAIGTLEGSPPVHFSLPVLHPLLG

SEQ ID NO: 80 - protein, 147 aa, Homo sapiens
MAGNSILLAAVSILSACQQSYFALQVGKARLKYKVTPPAVTGSPEFERVFRAQQNCVEFYPIFIITLWMAGWYFNQVFATCLGLVYIYGRHLYFWGYSEAAKKRITGFRLSLGILALLTLLGALGIANSFLDEYLDLNIAKKLRRQF

SEQ ID NO: 81 - protein, 466 aa, Homo sapiens
MTLKASEGESGGSMHTALSDLYLEHLLQKRSRPEAVSHPLNTVTEDMYTNGSPAPGSPAQVKGQEVRKVRLIQFEKVTEEPMGITLKLNEKQSCTVARILHGGMIHRQGSLHVGDEILEINGTNVTNHSVDQLQKAMKETKGMISLKVIPNQQSRLPALQMFMRAQFDYDPKKDNLIPCKEAGLKFATGDIIQIINKDDSNWWQGRVEGSSKESAGLIPSPELQEWRVASMAQSAPSEAPSCSPFGKKKKYKDKYLAKHSSIFDQLDVVSYEEVVRLPAFKRKTLVLIGASGVGRSHIKNALLSQNPEKFVYPVPYTTRPPRKSEEDGKEYHFISTEEMTRNISANEFLEFGSYQGNMFGTKFETVHQIHKQNKIAILDIEPQTLKIVRTAELSPFIVFIAPTDQGTQTEALQQLQKDSEAIRSQYAHYFDLSLVNNGVDETLKKLQEAFDQACSSPQWVPVSWVY

SEQ ID NO: 82 - protein, 1098 aa, Homo sapiens
MGSKERFHWQSHNVKQSGVDDMVLLPQITEDAIAANLRKRFMDDYIFTYIGSVLISVNPFKQMPYFTDREIDLYQGAAQYENPPHIYALTDNMYRNMLIDCENQCVIISGESGAGKTVAAKYIMGYISKVSGGGEKVQHVKDIILQSNPLLEAFGNAKTVRNNNSSRFGKYFEIQFSRGGEPDGGKISNFLLEKSRVVMQNENERNFHIYYQLLEGASQEQRQNLGLMTPDYYYYLNQSDTYQVDGTDDRSDFGETLSAMQVIGIPPSIQQLVLQLVAGILHLGNISFCEDGNYARVESVDLLAFPAYLLGIDSGRLQEKLTSRKMDSRWGGRSESINVTLNVEQAAYTRDALAKGLYARLFDFLVEAINRAMQKPQEEYSIGVLDIYGFEIFQKNGFEQFCINFVNEKLQQIFIELTLKAEQEEYVQEGIRWTPIQYFNNKVVCDLIENKLSPPGIMSVLDDVCATMHATGGGADQTLLQKLQAAVGTHEHFNSWSAGFVIHHYAGKVSYDVSGFCERNRDVLFSDLIELMQTSEQAFLRMLFPEKLDGDKKGRPSTAGSKIKKQANDLVATLMRCTPHYIRCIKPNETKRPRDWEENRVKHQVEYLGLKENIRVRRAGFAYRRQFAKFLQRYAILTPETWPRWRGDERQGVQHLLRAVNMEPDQYQMGSTKVFVKNPESLFLLEEVRERKFDGFARTIQKAWRRHVAVRKYEEMREEASNILLNKKERRRNSINRNFVGDYLGLEERPELRQFLGKRERVDFADSVTKYDRRFKPIKRDLILTPKCVYVIGREKVKKGPEKGQVCEVLKKKVDIQALRGVSLSTRQDDFFILQEDAADSFLESVFKTEFVSLLCKRFEEATRRPLPLTFSDTLQFRVKKEGWGGGGTRSVTFSRGFGDLAVLKVGGRTLTVSVGDGLPKSSKPTRKGMAKGKPRRSSQAPTRAAPAPPRGMDRNGVPPSARGGPLPLEIMSGGGTHRPPRGPPSTSLGASRRPRARPPSEHNTEFLNVPDQGMAGMQRKRSVGQRPVPGVGRPKPQPRTHGPRCRALYQYVGQDVDELSFNVNEVIEILMEDPSGWWKGRLHGQEGLFPGNYVEKI

SEQ ID NO: 83 - protein, 411 aa, Homo sapiens
MLLKTVLLLGHVAQVLMLDNGLLQTPPMGWLAWERFRCNINCDEDPKNCISEQLFMEMADRMAQDGWRDMGYTYLNIDDCWIGGRDASGRLMPDPKRFPHGIPFLADYVHSLGLKLGIYADMGNFTCMGYPGTTLDKVVQDAQTFAEWKVDMLKLDGCFSTPEERAQGYPKMAAALNATGRPIAFSCSWPAYEGGLPPRVNYSLLADICNLWRNYDDIQDSWWSVLSILNWFVEHQDILQPVAGPGHWNDPDMLLIGNFGLSLEQSRAQMALWTVLAAPLLMSTDLRTISAQNMDILQNPLMIKINQDPLGIQGRRIHKEKSLIEVYMRPLSNKASALVFFSCRTDMPYRYHSSLGQLNFTGSVIYEAQDVYSGDIISGLRDETNFTVIINPSGVVMWYLYPIKNLEMSQQ

SEQ ID NO: 84 - protein, 491 aa, Homo sapiens [sequence omitted]

SEQ ID NO: 85 - protein, 462 aa, Homo sapiens
MQLRKMQTVKKEQASLDASSNVDKMMVLNSALTEVSEDSTTGEELLLSEGSVGKNKSSACRRKREFIPDEKKDAMYWEKRRKNNEAAKRSREKRRLNDLVLENKLIALGEENATLKAELLSLKLKFGLISSTAYAQEIQKLSNSTAVYFQDYQTSKSNVSSFVDEHEPSMVSSSCISVIKHSPQSSLSDVSEVSSVEHTQESSVQGSCRSPENKFQIIKQEPMELESYTREPRDDRGSYTASIYQNYMGNSFSGYSHSPPLLQVNRSSSNSPRTSETDDGVVGKSSDGEDEQQVPKGPIHSPVELKHVHATVVKVPEVNSSALPHKLRIKAKAMQIKVEAFDNEFEATQKLSSPIDMTSKRHFELEKHSAPSMVHSSLTPFSVQVTNIQDWSLKSEHWHQKELSGKTQNSFKTGVVEMKDSGYKVSDPENLYLKQGIANLSAEVVSLKRLIATQPISASDSG

SEQ ID NO: 86 - protein, 1036 aa, Homo sapiens
MKMASTRCKLARYLEDLEDVDLKKFKMHLEDYPPQKGCIPLPRGQTEKADHVDLATLMIDFNGEEKAWAMAVWIFAAINRRDLYEKAKRDEPKWGSDNARVSNPTVICQEDSIEEEWMGLLEYLSRISICKMKKDYRKKYRKYVRSRFQCIEDRNARLGESVSLNKRYTRLRLIKEHRSQQEREQELLAIGKTKTCESPVSPIKMELLFDPDDEHSEPVHTVVFQGAAGIGKTILARKMMLDWASGTLYQDRFDYLFYIHCREVSLVTQRSLGDLIMSCCPDPNPPIHKIVRKPSRILFLMDGFDELQGAFDEHIGPLCTDWQKAERGDILLSSLIRKKLLPEASLLITTRPVALEKLQHLLDHPRHVEILGFSEAKRKEYFFKYFSDEAQARAAFSLIQENEVLFTMCFIPLVCWIVCTGLKQQMESGKSLAQTSKTTTAVYVFFLSSLLQPRGGSQEHGLCAHLWGLCSLAADGIWNQKILFEESDLRNHGLQKADVSAFLRMNLFQKEVDCEKFYSFIHMTFQEFFAAMYYLLEEEKEGRTNVPGSRLKLPSRDVTVLLENYGKFEKGYLIFVVRFLFGLVNQERTSYLEKKLSCKISQQIRLELLKWIEVKAKAKKLQIQPSQLELFYCLYEMQEEDFVQRAMDYFPKIEINLSTRMDHMVSSFCIENCHRVESLSLGFLHNMPKEEEEEEKEGRHLDMVQCVLPSSSHAACSHGLVNSHLTSSFCRGLFSVLSTSQSLTELDLSDNSLGDPGMRVLCETLQHPGCNIRRLWLGRCGLSHECCFDISLVLSSNQKLVELDLSDNALGDFGIRLLCVGLKHLLCNLKKLWLVSCCLTSACCQDLASVLSTSHSLTRLYVGENALGDSGVAILCEKAKNPQCNLQKLGLVNSGLTSVCCSALSSVLSTNQNLTHLYLRGNTLGDKGIKLLCEGLLHPDCKLQVLELDNCNLTSHCCWDLSTLLTSSQSLRKLSLGNNDLGDLGVMMFCEVLKQQSCLLQNLGLSEMYFNYETKSALETLQEEKPELTVVFEPSW

SEQ ID NO: 87 - protein, 320 aa, Homo sapiens
MAFPKKKLQGLVAATITPMTENGEINFSVIGQYVDYLVKEQGVKNIFVNGTTGEGLSLSVSERRQVAEEWVTKGKDKLDQVIIHVGALSLKESQELAQHAAEIGADGIAVIAPFFLKPWTKDILINFLKEVAAAAPALPFYYYHIPALTGVKIRAEELLDGILDKIPTFQGLKFSDTDLLDFGQCVDQNRQQQFAFLFGVDEQLLSALVMGATGAVGSTYNYLGKKTNQMLEAFEQKDFSLALNYQFCIQRFINFVVKLGFGVSQTKAIMTLVSGIPMGPPRLPLQKASREFTDSAEAKLKSLDFLSFTDLKDGNLEAGS

SEQ ID NO: 88 - protein, 452 aa, Homo sapiens
MGNLLGGVSFREPTTVEDCDSTWQTDSEPEPEEPGPGGGSEGPGQESEQPAQPPEQAGGRPGASPAPDEDAEAAGAEQGGDSTEATAKPKRSFYAARDLYKYRHQYPQNFKDIRYQNDLSNLRFYKNKIPFKPDGVYIEEVLSKWKGDYEKLEHNHTYIQWLFPLREQGLNFYAKELTTYEIEEFKKTKEAIRRFLLAYKMMLEFFGIKLTDKTGNVARAVNWQERFQHLNESQHNYLRITRILKSLGELGYESFKSPLVKFILHEALVENTIPNIKQSALEYFVYTIRDRRERRKLLRFAQKHYTPSENFIWGPPRKEQSEGSKAQKMSSPLASSHNSQTSMHKKAKDSKNSSSAVHLNSKTAEDKKVAPKEPVEETDRPSPEPSNEAAKPRNTEKDSNAENMNSQPEKTVTTPTEKKESVSPENNEEGGNDNQDNENPGNTNCHDVVLVQ

SEQ ID NO: 89 - protein, 645 aa, Homo sapiens
MGQTSVSTLSPQPGSVDGLDKASIANSDGPTAGSQTPPFKRKGKLSTIGKIFKPWKWRKKKTSDKFRETSAVLERKISTRQSREELIRRGVLKELPDQDGDVTVNFENSNGHMIPIGEESTREENVVKSEEGNGSVSEKTPPLEEQAEDKKENTENHSETPAAPALPPSAPPKPRPKPKPKKSPVPPKGATAGASHKGDEVPPIKKNTKAPGKQAPVPPPKPASRNTTREAAGSSHSKKTTGSKASASPSTSSTSSRPKASKETVSSKAGTVGTTKGKRKTDKQPITSHLSSDTTTSGTSDLKGEPAETRVESFKLEQTVPGAEEQNTGKFKSMVPPPPVAPAPSPLAPPLPLEDQCITASDTPVVLVSVGADLPVSALDPSQLLWAEEPTNRTTLYSGTGLSVNRENAKCFTTKEELGKTVPQLLTPGLMGESSESFSASEDEGHREYQANDSDSDGPILYTDDEDEDEDEDGSGESALASKIRRRDTLAIKLGNRPSKKELEDKNILQRTSEEERQEIRQQIGTKLVRRLSQRPTTEELEQRNILKQKNEEEEQEAKMELKRRLSRKLSLRPTVAELQARRILRFNEYVEVTDSPDYDRRADKPWARLTPADKAAIRKELNEFKSTEMEVHEESRQFTRFHRP

SEQ ID NO: 90 - protein, 483 aa, Homo sapiens
MAQADIALIGLAVMGQNLILNMNDHGFVVCAFNRTVSKVDDFLANEAKGTKVVGAQSLKEMVSKLKKPRRIILLVKAGQAVDDFIEKLVPLLDTGDIIIDGGNSEYRDTTRRCRDLKAKGILFVGSGVSGGEEGARYGPSLMPGGNKEAWPHIKTIFQGIAAKVGTGEPCCDWVGDEGAGHFVKMVHNGIEYGDMQLICEAYHLMKDVLGMAQDEMAQAFEDWNKTELDSFLIEITANILKFQDTDGKHLLPKIRDSAGQKGTGKWTAISALEYGVPVTLIGEAVFARCLSSLKDERIQASKKLKGPQKFQFDGDKKSFLEDIRKALYASKIISYAQGFMLLRQAATEFGWTLNYGGIALMWRGGCIIRSVFLGKIKDAFDRNPELQNLLLDDFFKSAVENCQDSWRRAVSTGVQAGIPMPCFTTALSFYDGYRHEMLPASLIQAQRDYFGAHTYELLAKPGQFIHTNWTGHGGTVSSSSYNA

SEQ ID NO: 91 - protein, 531 aa, Homo sapiens
MSKPHSEAGTAFIQTQQLHAAMADTFLEHMCRLDIDSPPITARNTGIICTIGPASRSVETLKEMIKSGMNVARLNFSHGTHEYHAETIKNVRTATESFASDPILYRPVAVALDTKGPEIRTGLIKGSGTAEVELKKGATLKITLDNAYMEKCDENILWLDYKNICKVVEVGSKIYVDDGLISLQVKQKGADFLVTEVENGGSLGSKKGVNLPGAAVDLPAVSEKDIQDLKFGVEQDVDMVFASFIRKASDVHEVRKVLGEKGKNIKIISKIENHEGVRRFDEILEASDGIMVARGDLGIEIPAEKVFLAQKMMIGRCNRAGKPVICATQMLESMIKKPRPTRAEGSDVANAVLDGADCIMLSGETAKGDYPLEAVRMQHLIAREAEAAIYHLQLFEELRRLAPITSDPTEATAVGAVEASFKCCSGAIIVLTKSGRSAHQVARYRPRAPIIAVTRNPQTARQAHLYRGIFPVLCKDPVQEAWAEDVDLRVNFAMNVGKARGFFKKGDVVIVLTGWRPGSGFTNTMRVVPVP

SEQ ID NO: 92 - protein, 524 aa, Homo sapiens
MYALFLLASLLGAALAGPVLGLKECTRGSAVWCQNVKTASDCGAVKHCLQTVWNKPTVKSLPCDICKDVVTAAGDMLKDNATEEEILVYLEKTCDWLPKPNMSASCKEIVDSYLPVILDIIKGEMSRPGEVCSALNLCESLQKHLAELNHQKQLESNKIPELDMTEVVAPFMANIPLLLYPQDGPRSKPQPKDNGDVCQDCIQMVTDIQTAVRTNSTFVQALVEHVKEECDRLGPGMADICKNYISQYSEIAIQMMMHMQPKEICALVGFCDEVKEMPMQTLVPAKVASKNVIPALELVEPIKKHEVPAKSDVYCEVCEFLVKEVTKLIDNNKTEKEILDAFDKMCSKLPKSLSEECQEVVDTYGSSILSILLEEVSPELVCSMLHLCSGTRLPALTVHVTQPKDGGFCEVCKKLVGYLDRNLEKNSTKQEILAALEKGCSFLPDPYQKQCDQFVAEYEPVLIEILVEVMDPSFVCLKIGACPSAHKPLLGTEKCIWGPSYWCQNTETAAQCNAVEHCKRHVWN

SEQ ID NO: 93 - protein, 416 aa, Homo sapiens
MMPQLQFKDAFWCRDFTAHTGYEVLLQRLLDGRKMCKDMEELLRQRAQAEERYGKELVQIARKAGGQTEINSLRASFDSLKQQMENVGSSHIQLALTLREELRSLEEFRERQKEQRKKYEAVMDRVQKSKLSLYKKAMESKKTYEQKCRDADDAEQAFERISANGHQKQVEKSQNKARQCKDSATEAERVYRQSIAQLEKVRAEWEQEHRTTCEAFQLQEFDRLTILRNALWVHSNQLSMQCVKDDELYEEVRLTLEGCSIDADIDSFIQAKSTGTEPPAPVPYQNYYDREVTPLTSSPGIQPSCGMIKRFSGLLHGSPKTTSLAASAASTETLTPTPERNEGVYTAIAVQEIQGNPASPAQEYRALYDYTAQNPDELDLSAGDILEVILEGEDGWWTVERNGQRGFVPGSYLEKL

SEQ ID NO: 94 - protein, 358 aa, Homo sapiens
MGNASNDSQSEDCETRQWLPPGESPAISSVMFSAGVLGNLIALALLARRWRGDVGCSAGRRSSLSLFHVLVTELVFTDLLGTCLISPVVLASYARNQTLVALAPESRACTYFAFAMTFFSLATMLMLFAMALERYLSIGHPYFYQRRVSRSGGLAVLPVIYAVSLLFCSLPLLDYGQYVQYCPGTWCFIRHGRTAYLQLYATLLLLLIVSVLACNFSVILNLIRMHRRSRRSRCGPSLGSGRGGPGARRRGERVSMAEETDHLILLAIMTITFAVCSLPFTIFAYMNETSSRKEKWDLQALRFLSINSIIDPWVFAILRPPVLRLMRSVLCCRISLRTQDATQTSCSTQSDASKQADL

SEQ ID NO: 95 - protein, 557 aa, Homo sapiens
MDDLDALLADLESTTSHISKRPVFLSEETPYSYPTGNHTYQEIAVPPPVPPPPSSEALNGTILDPLDQWQPSSSRFIHQQPQSSSPVYGSSAKTSSVSNPQDSVGSPCSRVGEEEHVYSFPNKQKSAEPSPTVMSTSLGSNLSELDRLLLELNAVQHNPPGFPADEANSSPPLPGALSPLYGVPETNSPLGGKAGPLTKEKPKRNGGRGLEDVRPSVESLLDELESSVPSPVPAITVNQGEMSSPQRVTSTQQQTRISASSATRELDELMASLSDFKFMAQGKTGSSSPPGGPPKPGSQLDSMLGSLQSDLNKLGVATVAKGVCGACKKPIAGQVVTAMGKTWHPEHFVCTHCQEEIGSRNFFERDGQPYCEKDYHNLFSPRCYYCNGPILDKVVTALDRTWHPEHFFCAQCGAFFGPEGFHEKDGKAYCRKDYFDMFAPKCGGCARAILENYISALNTLWHPECFVCRECFTPFVNGSFFEHDGQPYCEVHYHERRGSLCSGCQKPITGRCITAMAKKFHPEHFVCAFCLKQLNKGTFKEQNDKPYCQNCFLKLFC

SEQ ID NO: 96 - protein, 847 aa, Homo sapiens
MAKPLTDQEKRRQISIRGIVGVENVAELKKSFNRHLHFTLVKDRNVATTRDYYFALAHTVRDHLVGRWIRTQQHYYDKCPKRVYYLSLEFYMGRTLQNTMINLGLQNACDEAIYQLGLDIEELEEIEEDAGLGNGGLGRLAACFLDSMATLGLAAYGYGIRYEYGIFNQKIRDGWQVEEADDWLRYGNPWEKSRPEFMLPVHFYGKVEHTNTGTKWIDTQVVLALPYDTPVPGYMNNTVNTMRLWSARAPNDFNLRDFNVGDYIQAVLDRNLAENISRVLYPNDNFFEGKELRLKQEYFVVAATLQDIIRRFKASKFGSTRGAGTVFDAFPDQVAIQLNDTHPALAIPELMRIFVDIEKLPWSKAWELTQKTFAYTNHTVLPEALERWPVDLVEKLLPRHLEIIYEINQKHLDRIVALFPKDVDRLRRMSLIEEEGSKRINMAHLCIVGSHAVNGVAKIHSDIVKTKVFKDFSELEPDKFQNKTNGITPRRWLLLCNPGLAELIAEKIGEDYVKDLSQLTKLHSFLGDDVFLRELAKVKQENKLKFSQFLETEYKVKINPSSMFDVQVKRIHEYKRQLLNCLHVITMYNRIKKDPKKLFVPRTVIIGGKAAPGYHMAKMIIKLITSVADVVNNDPMVGSKLKVIFLENYRVSLAEKVIPATDLSEQISTAGTEASGTGNMKFMLNGALTIGTMDGANVEMAEEAGEENLFIFGMRIDDVAALDKKGYEAKEYYEALPELKLVIDQIDNGFFSPKQPDLFKDIINMLFYHDRFKVFADYEAYVKCQDKVSQLYMNPKAWNTMVLKNIAASGKFSSDRTIKEYAQNIWNVEPSDLKISLSNESNKVNGN

SEQ ID NO: 97 - protein, 361 aa, Homo sapiens
MAGGRHRRVVGTLHLLLLVAALPWASRGVSPSASAWPEEKNYHQPAILNSSALRQIAEGTSISEMWQNDLQPLLIERYPGSPGSYAARQHIMQRIQRLQADWVLEIDTFLSQTPYGYRSFSNIISTLNPTAKRHLVLACHYDSKYFSHWNNRVFVGATDSAVPCAMMLELARALDKKLLSLKTVSDSKPDLSLQLIFFDGEEAFLHWSPQDSLYGSRHLAAKMASTPHPPGARGTSQLHGMDLLVLLDLIGAPNPTFPNFFPNSARWFERLQAIEHELHELGLLKDHSLEGRYFQNYSYGGVIQDDHIPFLRRGVPVLHLIPSPFPEVWHTMDDNEENLDESTIDNLNKILQVFVLEYLHL

SEQ ID NO: 98 - protein, 234 aa, Homo sapiens
MRKPDSKIVLLGDMNVGKTSLLQRYMERRFPDTVSTVGGAFYLKQWRSYNISIWDTAGREQFHGLGSMYCRGAAAIILTYDVNHRQSLVELEDRFLGLTDTASKDCLFAIVGNKVDLTEEGALAGQEKEECSPNMDAGDRVSPRAPKQVQLEDAVALYKKILKYKMLDEQDVPAAEQMCFETSAKTGYNVDLLFETLFDLVVPMILQQRAERPSHTVDISSHKPPKRTRSGCCA

SEQ ID NO: 99 - protein, 221 aa, Homo sapiens
MSDGDYDYLIKFLALGDSGVGKTSVLYQYTDGKFNSKFITTVGIDFREKRVVYRASGPDGATGRGQRIHLQLWDTAGQERFRSLTTAFFRDAMGFLLLFDLTNEQSFLNVRNWISQLQMHAYCENPDIVLCGNKSDLEDQRVVKEEEAIALAEKYGIPYFETSAANGTNISQAIEMLLDLIMKRMERCVDKSWIPEGVVRSNGHASTDQLSEEKEKGACGC

SEQ ID NO: 100 - protein, 225 aa, Homo sapiens
MAGGGAGDPGLGAAAAPAPETREHLFKVLVIGELGVGKTSIIKRYVHQLFSQHYRATIGVDFALKVLNWDSRTLVRLQLWDIAGQERFGNMTRVYYKEAVGAFVVFDISRSSTFEAVLKWKSDLDSKVHLPNGSPIPAVLLANKCDQNKDSSQSPSQVDQFCKEHGFAGWFETSAKDNINIEEAARFLVEKILVNHQSFPNEENDVDKIKLDQETLRAENKSQCC

SEQ ID NO: 101 - protein, 593 aa, Homo sapiens
MTAEDSTAAMSSDSAAGSSAKVPEGVAGAPNEAALLALMERTGYSMVQENGQRKYGGPPPGWEGPHPQRGCEVFVGKIPRDVYEDELVPVFEAVGRIYELRLMMDFDGKNRGYAFVMYCHKHEAKRAVRELNNYEIRPGRLLGVCCSVDNCRLFIGGIPKMKKREEILEEIAKVTEGVLDVIVYASAADKMKNRGFAFVEYESHRAAAMARRKLMPGRIQLWGHQIAVDWAEPEIDVDEDVMETVKILYVRNLMIETTEDTIKKSFGQFNPGCVERVKKIRDYAFVHFTSREDAVHAMNNLNGTELEGSCLEVTLAKPVDKEQYSRYQKAARGGGAAEAAQQPSYVYSCDPYTLAYYGYPYNALIGPNRDYFVKAGSIRGRGRGAAGNRAPGPRGSYLGGYSAGRGIYSRYHEGKGKQQEKGYELVPNLEIPTVNPVAIKPGTVAIPAIGAQYSMFPAAPAPKMIEDGKIHTVEHMISPIAVQPDPASAAAAAAAAAAAAAAVIPTVSTPPPFQGRPITPVYTVAPNVQRIPTAGIYGASYVPFAAPATATIATLQKNAAAAAAMYGGYAGYIPQAFPAAAIQVPIPDVYQTY

SEQ ID NO: 102 - protein, 257 aa, Homo sapiens
MVSWMICRLVVLVFGMLCPAYASYKAVKTKNIREYVRWMMYWIVFALFMAAEIVTDIFISWFPFYYEIKMAFVLWLLSPYTKGASLLYRKFVHPSLSRHEKEIDAYIVQAKERSYETVLSFGKRGLNIAASAAVQAATKSQGALAGRLRSFSMQDLRSISDAPAPAYHDPLYLEDQVSHRRPPIGYRAGGLQDSDTEDECWSDTEAVPRAPARPREKPLIRSQSLRVVKRKPPVREGTSRSLKVRTRKKTVPSDVDS

SEQ ID NO: 103 - protein, 181 aa, Homo sapiens
MFNRAVSRLSRKRPPSDIHDSDGSSSSSHQSLKSTAKWAASLENLLEDPEGVKRFREFLKKEFSEENVLFWLACEDFKKMQDKTQMQEKAKEIYMTFLSSKASSQVNVEGQSRLNEKILEEPHPLMFQKLQDQIFNLMKYDSYSRFLKSDLFLKHKRTEEEEEDLPDAQTAAKRASRIYNT

SEQ ID NO: 104 - protein, 419 aa, Homo sapiens
MSCAGRAGPARLAALALLTCSLWPARADNASQEYYTALINVTVQEPGRGAPLTFRIDRGRYGLDSPKAEVRGQVLAPLPLHGVADHLGCDPQTRFFVPPNIKQWIALLQRGNCTFKEKISRAAFHNAVAVVIYNNKSKEEPVTMTHPGTGDIIAVMITELRGKDILSYLEKNISVQMTIAVGTRMPPKNFSRGSLVFVSISFIVLMIISSAWLIFYFIQKIRYTNARDRNQRRLGDAAKKAISKLTTRTVKKGDKETDPDFDHCAVCIESYKQNDVVRILPCKHVFHKSCVDPWLSEHCTCPMCKLNILKALGIVPNLPCTDNVAFDMERLTRTQAVNRRSALGDLAGDNSLGLEPLRTSGISPLPQDGELTPRTGEINIAVTKEWFIIASFGLLSALTLCYMIIRATASLNANEVEWF

SEQ ID NO: 105 - protein, 400 aa, Homo sapiens
MSQVLGKPQPQDEDDAEEEEEEDELVGLADYGDGPDSSDADPDSGTEEGVLDFSDPFSTEVKPRILLMGLRRSGKSSIQKVVFHKMSPNETLFLESTNKICREDVSNSSFVNFQIWDFPGQIDFFDPTFDYEMIFRGTGALIFVIDSQDDYMEALARLHLTVTRAYKVNTDINFEVFIHKVDGLSDDHKIETQRDIHQRANDDLADAGLEKIHLSFYLTSIYDHSIFEAFSKVVQKLIPQLPTLENLLNIFISNSGIEKAFLFDVVSKIYIATDSTPVDMQTYELCCDMIDVVIDISCIYGLKEDGAGTPYDKESTAIIKLNNTTVLYLKEVTKFLALVCFVREESFERKGLIDYNFHCFRKAIHEVFEVRMKVVKSRKVQNRLQKKKRATPNGTPRVLL

SEQ ID NO: 106 - protein, 776 aa, Homo sapiens
MAAPGDPQDELLPLAGPGSQWLRHRGEGENEAVTPKGATPAPQAGEPSPGLGARAREAASREAGSGPARQSPVAMETASTGVAGVSSAMDHTFSTTSKDGEGSCYTSLISDICYPPQEDSTYFTGILQKENGHVTISESPEELGTPGPSLPDVPGIESRGLFSSDSGIEMTPAESTEVNKILADPLDQMKAEAYKYIDITRPEEVKHQEQHHPELEDKDLDFKNKDTDISIKPEGVREPDKPAPVEGKIIKDHLLEESTFAPYIDDLSEEQRRAPQITTPVKITLTEIEPSVETTTQEKTPEKQDICLKPSPDTVPTVTVSEPEDDSPGSITPPSSGTEPSAAESQGKGSISEDELITAIKEAKGLSYETAENPRPVGQLADRPEVKARSGPPTIPSPLDHEASSAESGDSEIELVSEDPMAAEDALPSGYVSFGHVGGPPPSPASPSIQYSILREEREAELDSELIIESCDASSASEESPKREQDSPPMKPSALDAIREETGVRAEERAPSRRGLAEPGSFLDYPSTEPQPGPELPPGDGALEPETPMLPRKPEEDSSSNQSPAATKGPGPLGPGAPPPLLFLNKQKAIDLLYWRDIKQTGIVFGSFLLLLFSLTQFSVVSVVAYLALAALSATISFRIYKSVLQAVQKTDEGHPFKAYLELEITLSQEQIQKYTDCLQFYVNSTLKELRRLFLVQDLVDSLKFAVLMWLLTYVGALFNGLTLLLMAVVSMFTLPVVYVKHQAQIDQYLGLVRTHINAVVAKIQAKIPGAKRHAE

SEQ ID NO: 107 - protein, 462 aa, Homo sapiens
MDTKHFLPLDFSTQVNSSLTSPTGRGSMAAPSLHPSLGPGIGSPGQLHSPISTLSSPINGMGPPFSVISSPMGPHSMSVPTTPTLGFSTGSPQLSSPMNPVSSSEDIKPPLGLNGVLKVPAHPSGNMASFTKHICAICGDRSSGKHYGVYSCEGCKGFFKRTVRKDLTYTCRDNKDCLIDKRQRNRCQYCRYQKCLAMGMKREAVQEERQRGKDRNENEVESTSSANEDMPVERILEAELAVEPKTETYVEANMGLNPSSPNDPVTNICQAADKQLFTLVEWAKRIPHFSELPLDDQVILLRAGWNELLIASFSHRSIAVKDGILLATGLHVHRNSAHSAGVGAIFDRVLTELVSKMRDMQMDKTELGCLRAIVLFNPDSKGLSNPAEVEALREKVYASLEAYCKHKYPEQPGRFAKLLLRLPALRSIGLKCLEHLFFFKLIGDTPIDTFLMEMLEAPHQMT

SEQ ID NO: 108 - protein, 478 aa, Homo sapiens
MGRCCFYTAGTLSLLLLVTSVTLLVARVFQKAVDQSIEKKIVLRNGTEAFDSWEKPPLPVYTQFYFFNVTNPEEILRGETPRVEEVGPYTYRELRNKANIQFGDNGTTISAVSNKAYVFERDQSVGDPKIDLIRTLNIPVLTVIEWSQVHFLREIIEAMLKAYQQKLFVTHTVDELLWGYKDEILSLIHVFRPDISPYFGLFYEKNGTNDGDYVFLTGEDSYLNFTKIVEWNGKTSLDWWITDKCNMINGTDGDSFHPLITKDEVLYVFPSDFCRSVYITFSDYESVQGLPAFRYKVPAEILANTSDNAGFCIPEGNCLGSGVLNVSICKNGAPIIMSFPHFYQADERFVSAIEGMHPNQEDHETFVDINPLTGIILKAAKRFQINIYVKKLDDFVETGDIRTMVFPVMYLNESVHIDKETASRLKSMINTTLIITNIPYIIMALGVFFGLVFTWLACKGQGSMDEGTADERAPLIRT

SEQ ID NO: 109 - protein, 298 aa, Homo sapiens
MSLYPSLEDLKVDKVIQAQTAFSANPANPAILSEASAPIPHDGNLYPRLYPELSQYMGLSLNEEEIRANVAVVSGAPLQGQLVARPSSINYMVAPVTGNDVGIRRAEIKQGIREVILCKDQDGKIGLRLKSIDNGIFVQLVQANSPASLVGLRFGDQVLQINGENCAGWSSDKAHKVLKQAFGEKITMTIRDRPFERTITMHKDSTGHVGFIFKNGKITSIVKDSSAARNGLLTEHNICEINGQNVIGLKDSQIADILSTSGTVVTITIMPAFIFEHIIKRMAPSIMKSLMDHTIPEV

SEQ ID NO: 110 - protein, 761 aa, Homo sapiens
MALPALGLDPWSLLGLFLFQLLQLLLPTTTAGGGGQGPMPRVRYYAGDERRALSFFHQKGLQDFDTLLLSGDGNTLYVGAREAILALDIQDPGVPRLKNMIPWPASDRKKSECAFKKKSNETQCFNFIRVLVSYNVTHLYTCGTFAFSPACTFIELQDSYLLPISEDKVMEGKGQSPFDPAHKHTAVLVDGMLYSGTMNNFLGSEPILMRTLGSQPVLKTDNFLRWLHHDASFVAAIPSTQVVYFFFEETASEFDFFERLHTSRVARVCKNDVGGEKLLQKKWTTFLKAQLLCTQPGQLPFNVIRHAVLLPADSPTAPHIYAVFTSQWQVGGTRSSAVCAFSLLDIERVFKGKYKELNKETSRWTTYRGPETNPRPGSCSVGPSSDKALTFMKDHFLMDEQVVGTPLLVKSGVEYTRLAVETAQGLDGHSHLVMYLGTTTGSLHKAVVSGDSSAHLVEEIQLFPDPEPVRNLQLAPTQGAVFVGFSGGVWRVPRANCSVYESCVDCVLARDPHCAWDPESRTCCLLSAPNLNSWKQDMERGNPEWACASGPMSRSLRPQSRPQIIKEVLAVPNSILELPCPHLSALASYYWSHGPAAVPEASSTVYNGSLLLIVQDGVGGLYQCWATENGFSYPVISYWVDSQDQTLALDPELAGIPREHVKVPLTRVSGGAALAAQQSYWPHFVTVTVLFALVLSGALIILVASPLRALRARGKVQGCETLRPGEKAPLSREQHLQSPKECRTSASDVDADNNCLGTEVA

SEQ ID NO: 111 - protein, 461 aa, Homo sapiens
MSAQCCAGQLACCCGSAGCSLCCDCCPRIRQSLSTRFMYALYFILVVVLCCIMMSTTVAHKMKEHIPFFEDMCKGIKAGDTCEKLVGYSAVYRVCFGMACFFFIFCLLTLKINNSKSCRAHIHNGFWFFKLLLLGAMCSGAFFIPDQDTFLNAWRYVGAVGGFLFIGIQLLLLVEFAHKWNKNWTAGTASNKLWYASLALVTLIMYSIATGGLVLMAVFYTQKDSCMENKILLGVNGGLCLLISLVAISPWVQNRQPHSGLLQSGVISCYVTYLTFSALSSKPAEVVLDEHGKNVTICVPDFGQDLYRDENLVTILGTSLLIGCILYSCLTSTTRSSSDALQGRYAAPELEIARCCFCFSPGGEDTEEQQPGKEGPRVIYDEKKGTVYIYSYFHFVFFLASLYVMMTVTNWFNYESANIESFFSGSWSIFWVKMASCWICVLLYLCTLVAPLCCPTREFSV

SEQ ID NO: 112 - protein, 504 aa, Homo sapiens
MEPAGPAPGRLGPLLCLLLAASCAWSGVAGEEELQVIQPDKSVLVAAGETATLRCTATSLIPVGPIQWFRGAGPGRELIYNQKEGHFPRVTTVSDLTKRNNMDFSIRIGNITPADAGTYYCVKFRKGSPDDVEFKSGAGTELSVRAKPSAPVVSGPAARATPQHTVSFTCESHGFSPRDITLKWFKNGNELSDFQTNVDPVGESVSYSIHSTAKVVLTREDVHSQVICEVAHVTLQGDPLRGTANLSETIRVPPTLEVTQQPVRAENQVNVTCQVRKFYPQRLQLTWLENGNVSRTETASTVTENKDGTYNWMSWLLVNVSAHRDDVKLTCQVEHDGQPAVSKSHDLKVSAHPKEQGSNTAAENTGSNERNIYIVVGVVCTLLVALLMAALYLVRIRQKKAQGSTSSTRLHEPEKNAREITQDTNDITYADLNLPKGKKPAPQAAEPNNHTEYASIQTSPQPASEDTLTYADLDMVHLNRTPKQPAPKPEPSFSEYASVQVPRK

SEQ ID NO: 113 - protein, 398 aa, Homo sapiens
MPVPASWPHLPSPFLLMTLLLGRLTGVAGEDELQVIQPEKSVSVAAGESATLRCAMTSLIPVGPIMWFRGAGAGRELIYNQKEGHFPRVTTVSELTKRNNLDFSISISNITPADAGTYYCVKFRKGSPDDVEFKSGAGTELSVRAKPSAPVVSGPAVRATPEHTVSFTCESHGFSPRDITLKWFKNGNELSDFQTNVDPAGDSVSYSIHSTARVVLTRGDVHSQVICEIAHITLQGDPLRGTANLSEAIRVPPTLEVTQQPMRAENQANVTCQVSNFYPRGLQLTWLENGNVSRTETASTLIENKDGTYNWMSWLLVNTCAHRDDVVLTCQVEHDGQQAVSKSYALEISAHQKEHGSDITHEAALAPTAPLLVALLLGPKLLLVVGVSAIYICWKQKA

SEQ ID NO: 114 - protein, 683 aa, Homo sapiens
MAALLLLPLLLLLPLLLLKLHLWPQLRWLPADLAFAVRALCCKRALRARALAAAAADPEGPEGGCSLAWRLAELAQQRAAHTFLIHGSRRFSYSEAERESNRAARAFLRALGWDWGPDGGDSGEGSAGEGERAAPGAGDAAAGSGAEFAGGDGAARGGGAAAPLSPGATVALLLPAGPEFLWLWFGLAKAGLRTAFVPTALRRGPLLHCLRSCGARALVLAPEFLESLEPDLPALRAMGLHLWAAGPGTHPAGISDLLAEVSAEVDGPVPGYLSSPQSITDTCLYIFTSGTTGLPKAARISHLKILQCQGFYQLCGVHQEDVIYLALPLYHMSGSLLGIVGCMGIGATVVLKSKFSAGQFWEDCQQHRVTVFQYIGELCRYLVNQPPSKAERGHKVRLAVGSGLRPDTWERFVRRFGPLQVLETYGLTEGNVATINYTGQRGAVGRASWLYKHIFPFSLIRYDVTTGEPIRDPQGHCMATSPGEPGLLVAPVSQQSPFLGYAGGPELAQGKLLKDVFRPGDVFFNTGDLLVCDDQGFLRFHDRTGDTFRWKGENVATTEVAEVFEALDFLQEVNVYGVTVPGHEGRAGMAALVLRPPHALDLMQLYTHVSENLPPYARPRFLRLQESLATTETFKQQKVRMANEGFDPSTLSDPLYVLDQAVGAYLPLTTARYSALLAGNLRI

SEQ ID NO: 115 - protein, 143 aa, Homo sapiens
MAMHFIFSDTAVLLFDFWSVHSPAGMALSVLVLLLLAVLYEGIKVGKAKLLNQVLVNLPTSISQQTIAETDGDSAGSDSFPVGRTHHRWYLCHFGQSLIHVIQVVIGYFIMLAVMSYNTWIFLGVVLGSAVGYYLAYPLLSTA

SEQ ID NO: 116 - protein, 476 aa, Homo sapiens
MSTQRLRNEDYHDYSSTDVSPEESPSEGLNNLSSPGSYQRFGQSNSTTWFQTLIHLLKGNIGTGLLGLPLAVKNAGIVMGPISLLIIGIVAVHCMGILVKCAHHFCRRLNKSFVDYGDTVMYGLESSPCSWLRNHAHWGRRVVDFFLIVTQLGFCCVYFVFLADNFKQVIEAANGTTNNCHNNETVILTPTMDSRLYMLSFLPFLVLLVFIRNLRALSIFSLLANITMLVSLVMIYQFIVQRIPDPSHLPLVAPWKTYPLFFGTAIFSFEGIGMVLPLENKMKDPRKFPLILYLGMVIVTILYISLGCLGYLQFGANIQGSITLNLPNCWLYQSVKLLYSIGIFFTYALQFYVPAEIIIPFFVSRAPEHCELVVDLFVRTVLVCLTCILAILIPRLDLVISLVGSVSSSALALIIPPLLEVTTFYSEGMSPLTIFKDALISILGFVGFVVGTYEALYELIQPSNAPIFINSTCAFI

SEQ ID NO: 117 - protein, 710 aa, Homo sapiens
MQGKKPGGSSGGGRSGELQGDEAQRNKKKKKKVSCFSNIKIFLVSECALMLAQGTVGAYLVSVLTTLERRFNLQSADVGVIASSFEIGNLALILFVSYFGARGHRPRLIGCGGIVMALGALLSALPEFLTHQYKYEAGEIRWGAEGRDVCAANGSGGDEGPDPDLICRNRTATNMMYLLLIGAQVLLGIGATPVQPLGVSYIDDHVRRKDSSLYIGILFTMLVFGPACGFILGSFCTKIYVDAVFIDTSNLDITPDDPRWIGAWWGGFLLCGALLFFSSLLMFGFPQSLPPHSEPAMESEQAMLSEREYERPKPSNGVLRHPLEPDSSASCFQQLRVIPKVTKHLLSNPVFTCIILAACMEIAVVAGFAAFLGKYLEQQFNLTTSSANQLLGMTAIPCACLGIFLGGLLVKKLSLSALGAIRMAMLVNLVSTACYVSFLFLGCDTGPVAGVTVPYGNSTAPGSALDPYSPCNNNCECQTDSFTPVCGADGITYLSACFAGCNSTNLTGCACLTTVPAENATVVPGKCPSPGCQEAFLTFLCVMCICSLIGAMAQTPSVIILIRTVSPELKSYALGVLFLLLRLLGFIPPPLIFGAGIDSTCLFWSTFCGEQGACVLYDNVVYRYLYVSIAIALKSFAFILYTTTWQCLRKNYKRYIKNHEGGLSTSEFFASTLTLDNLGRDPVPANQTHRTKFIYNLEDHEWCENMESVL

SEQ ID NO: 118 - protein, 831 aa, Homo sapiens
MERPWGAADGLSRWPHGLGLLLLLQLLPPSTLSQDRLDAPPPPAAPLPRWSGPIGVSWGLRAAAAGGAFPRGGRWRRSAPGEDEECGRVRDFVAKLANNTHQHVFDDLRGSVSLSWVGDSTGVILVLTTFHVPLVIMTFGQSKLYRSEDYGKNFKDITDLINNTFIRTEFGMAIGPENSGKVVLTAEVSGGSRGGRIFRSSDFAKNFVQTDLPFHPLTQMMYSPQNSDYLLALSTENGLWVSKNFGGKWEEIHKAVCLAKWGSDNTIFFTTYANGSCKADLGALELWRTSDLGKSFKTIGVKIYSFGLGGRFLFASVMADKDTTRRIHVSTDQGDTWSMAQLPSVGQEQFYSILAANDDMVFMHVDEPGDTGFGTIFTSDDRGIVYSKSLDRHLYTTTGGETDFTNVTSLRGVYITSVLSEDNSIQTMITFDQGGRWTHLRKPENSECDATAKNKNECSLHIHASYSISQKLNVPMAPLSEPNAVGIVIAHGSVGDAISVMVPDVYISDDGGYSWTKMLEGPHYYTILDSGGIIVAIEHSSRPINVIKFSTDEGQCWQTYTFTRDPIYFTGLASEPGARSMNISIWGFTESFLTSQWVSYTIDFKDILERNCEEKDYTIWLAHSTDPEDYEDGCILGYKEQFLRLRKSSVCQNGRDYVVTKQPSICLCSLEDFLCDFGYYRPENDSKCVEQPELKGHDLEFCLYGREEHLTTNGYRKIPGDKCQGGVNPVREVKDLKKKCTSNFLSPEKQNSKSNSVPIILAIVGLMLVTVVAGVLIVKKYVCGGRFLVHRYSVLQQHAEANGVDGVDALDTASHTNKSGYHDDSDEDLLE

SEQ ID NO: 119 - protein, 331 aa, Homo sapiens
MRGYLVAIFLSAVFLYYVLHCILWGTNVYWVAPVEMKRRNKIQPCLSKPAFASLLRFHQFHPFLCAADFRKIASLYGSDKFDLPYGMRTSAEYFRLALSKLQSCDLFDEFDNIPCKKCVVVGNGGVLKNKTLGEKIDSYDVIIRMNNGPVLGHEEEVGRRTTFRLFYPESVFSDPIHNDPNTTVILTAFKPHDLRWLLELLMGDKINTNGFWKKPALNLIYKPYQIRILDPFIIRTAAYELLHFPKVFPKNQKPKHPTTGIIAITLAFYICHEVHLAGFKYNFSDLKSPLHYYGNATMSLMNKNAYHNVTAEQLFLKDIIEKNLVINLTQD

SEQ ID NO: 120 - protein, 287 aa, Homo sapiens
MKDRLAELLDLSKQYDQQFPDGDDEFDSPHEDIVFETDHILESLYRDIRDIQDENQLLVADVKRLGKQNARFLTSMRRLSSIKRDTNSIAKAIKARGEVIHCKLRAMKELSEAAEAQHGPHSAVARISRAQYNALTLTFQRAMHDYNQAEMKQRDNCKIRIQRQLEIMGKEVSGDQIEDMFEQGKWDVFSENLLADVKGARAALNEIESRHRELLRLESRIRDVHELFLQMAVLVEKQADTLNVIELNVQKTVDYTGQAKAQVRKAVQYEEKNPCRTLCCFCCPCLK

SEQ ID NO: 121 - protein, 295 aa, Homo sapiens
MELIQDISRPPLEYVKGVPLIKYFAEALGPLQSFQARPDDLLISTYPKSGTTWVSQILDMIYQGGDLEKCHRAPIFMRVPFLEFKVPGIPSGMETLKNTPAPRLLKTHLPLALLPQTLLDQKVKVVYVARNAKDVAVSYYHFYHMAKVYPHPGTWESFLEKFMAGEVSYGSWYQHVQEWWELSRTHPVLYLFYEDMKENPKREIQKILEFVGRSLPEETVDLMVEHTSFKEMKKNPMTNYTTVRREFMDHSISPFMRKGMAGDWKTTFTVAQNERFDADYAKKMAGCSLSFRSEL

SEQ ID NO: 122 - protein, 1155 aa, Homo sapiens
MWLKPEEVLLKNALKLWVTQKSSCYFILQRRRGHGEGGGRLTGRLVGALDAVLDSNARVAPFRILLQVPGSQVYSPIACGELLNGSDVYWAIATGATLEEINQHWDWLEQNLLHTLSVFDNKDDIASFVKGKVKALIAEETSSRLAEQEEEPEKFREALVKFEARFNFPEAEKLVTYYSCCCWKGRVPRQGWLYLSINHLCFYSFFLGKELKLVVPWVDIQKLERTSNVFLTDTIRITTQNKERDFSMFLNLDEVFKVMEQLADVTLRRLLDNEVFDLDPDLQEPSQITKRDLEARAQNEFFRAFFRLPRKEKLHAVVDCSLWTPFSRCHTTGRMFASDSYICFASREDGCCKIILPLREVVSIEKMEDTSLLPHPIIVSIRSKVAFQFIELRDRDSLVEALLARLKQVHANHPVHYDTSADDDMASLVFHSTSMCSDHRFGDLEMMSSQNSEESEKEKSPLMHPDALVTAFQQSGSQSPDSRMSREQIKISLWNDHFVEYGRTVCMFRTEKIRKLVAMGIPESLRGRLWLLFSDAVTDLASHPGYYGNLVEESLGKCCLVTEEIERDLHRSLPEHPAFQNETGIAALRRVLTAYAHRNPKIGYCQSMNILTSVLLLYTKEEEAFWLLVAVCERMLPDYFNHRVIGAQVDQSVFEELIKGHLPELAEHMNDLSALASVSLSWFLTLFLSIMPLESAVNVVDCFFYDGIKAIFQLGLAVLEANAEDLCSSKDDGQALMILSRFLDHIKNEDSPGPPVGSHHAFFSDDQEPYPVTDISDLIRDSYEKFGDQSVEQIEHLRYKHRIRVLQGHEDTTKQNVLRVVIPEVSILPEDLEELYDLFKREHMMSCYWEQPRPMASRHDPSRPYAEQYRIDARQFAHLFQLVSPWTCGAHTEILAERTFRLLDDNMDQLIEFKAFVSCLDIMYNGEMNEKIKLLYRLHIPPALTENDRDSQSPLRNPLLSTSRPLVFGKPNGDAVDYQKQLKQMIKDLAKEKDKTEKELPKMSQREFIQFCKTLYSMFHEDPEENDLYQAIATVTTLLLQIGEVGQRGSSSGSCSQECGEELRASAPSPEDSVFADTGKTPQDSQAFPEAAERDWTVSLEHILASLLTEQSLVNFFEKPLDMKSKLENAKINQYNLKTFEMSHQSQSELKLSNL

SEQ ID NO: 123 - protein, 533 aa, Homo sapiens
MEALGFLKLEVNGPMVTVALSVALLALLKWYSTSAFSRLEKLGLRHPKPSPFIGNLTFFRQGFWESQMELRKLYGPLCGYYLGRRMFIVISEPDMIKQVLVENFSNFTNRMASGLEFKSVADSVLFLRDKRWEEVRGALMSAFSPEKLNEMVPLISQACDLLLAHLKRYAESGDAFDIQRCYCNYTTDVVASVAFGTPVDSWQAPEDPFVKHCKRFFEFCIPRPILVLLLSFPSIMVPLARILPNKNRDELNGFFNKLIRNVIALRDQQAAEERRRDFLQMVLDARHSASPMGVQDFDIVRDVFSSTGCKPNPSRQHQPSPMARPLTVDEIVGQAFIFLIAGYEIITNTLSFATYLLATNPDCQEKLLREVDVFKEKHMAPEFCSLEEGLPYLDMVIAETLRMYPPAFRFTREAAQDCEVLGQRIPAGAVLEMAVGALHHDPEHWPSPETFNPERFTAEARQQHRPFTYLPFGAGPRSCLGVRLGLLEVKLTLLHVLHKFRFQACPETQVPLQLESKSALGPKNGVYIKIVSR

SEQ ID NO: 124 - protein, 220 aa, Homo sapiens
MGAAARTLRLALGLLLLATLLRPADACSCSPVHPQQAFCNADVVIRAKAVSEKEVDSGNDIYGNPIKRIQYEIKQIKMFKGPEKDIEFIYTAPSSAVCGVSLDVGGKKEYLIAGKAEGDGKMHITLCDFIVPWDTLSTTQKKSLNHRYQMGCECKITRCPMIPCYISSPDECLWMDWVTEKNINGHQAKFFACIKRSDGSCAWYRGAAPPKQEFLDIEDP

SEQ ID NO: 125 - protein, 623 aa, Homo sapiens
MESYHKPDQQKLQALKDTANRLRISSIQATTAAGSGHPTSCCSAAEIMAVLFFHTMRYKSQDPRNPHNDRFVLSKGHAAPILYAVWAEAGFLAEAELLNLRKISSDLDGHPVPKQAFTDVATGSLGQGLGAACGMAYTGKYFDKASYRVYCLLGDGELSEGSVWEAMAFASIYKLDNLVAILDINRLGQSDPAPLQHQMDIYQKRCEAFGWHAIIVDGHSVEELCKAFGQAKHQPTAIIAKTFKGRGITGVEDKESWHGKPLPKNMAEQIIQEIYSQIQSKKKILATPPQEDAPSVDIANIRMPSLPSYKVGDKIATRKAYGQALAKLGHASDRIIALDGDTKNSTFSEIFKKEHPDRFIECYIAEQNMVSIAVGCATRNRTVPFCSTFAAFFTRAFDQIRMAAISESNINLCGSHCGVSIGEDGPSQMALEDLAMFRSVPTSTVFYPSDGVATEKAVELAANTKGICFIRTSRPENAIIYNNNEDFQVGQAKVVLKSKDDQVTVIGAGVTLHEALAAAELLKKEKINIRVLDPFTIKPLDRKLILDSARATKGRILTVEDHYYEGGIGEAVSSAVVGEPGITVTHLAVNRVPRSGKPAELLKMFGIDRDAIAQAVRGLITKA

SEQ ID NO: 126 - protein, 461 aa, Homo sapiens
MAPVAVWAALAVGLELWAAAHALPAQVAFTPYAPEPGSTCRLREYYDQTAQMCCSKCSPGQHAKVFCTKTSDTVCDSCEDSTYTQLWNWVPECLSCGSRCSSDQVETQACTREQNRICTCRPGWYCALSKQEGCRLCAPLRKCRPGFGVARPGTETSDVVCKPCAPGTFSNTTSSTDICRPHQICNVVAIPGNASMDAVCTSTSPTRSMAPGAVHLPQPVSTRSQHTQPTPEPSTAPSTSFLLPMGPSPPAEGSTGDFALPVGLIVGVTALGLLIIGVVNCVIMTQVKKKPLCLQREAKVPHLPADKARGTQGPEQQHLLITAPSSSSSSLESSASALDRRAPTRNQPQAPGVEASGAGEARASTGSSDSSPGGHGTQVNVTCIVNVCSSSDHSSQCSSQASSTMGDTDSSPSESPKDEQVPFSKEECAFRSQLETPETLLGSTEEKPLPLGVPDAGMKPS

SEQ ID NO: 127 - protein, 249 aa, Homo sapiens
MAARRSQRRRGRRGEPGTALLVPLALGLGLALACLGLLLAVVSLGSRASLSAQEPAQEELVAEEDQDPSELNPQTEESQDPAPFLNRLVRPRRSAPKGRKTRARRAIAAHYEVHPRPGQDGAQAGVDGTVSGWEEARINSSSPLRYNRQIGEFIVTRAGLYYLYCQVHFDEGKAVYLKLDLLVDGVLALRCLEEFSATAASSLGPQLRLCQVSGLLALRPGSSLRIRTLPWAHLKAAPFLTYFGLFQVH

SEQ ID NO: 128 - protein, 250 aa, Homo sapiens [sequence omitted]

SEQ ID NO: 129 - protein, 372 aa, Homo sapiens
MRVGPVRSAMSGASQPRGPALLFPATRGVPAKRLLDADDAAAVAAKCPRLSECSSPPDYLSPPGSPCSPQPPPAAPGAGGGSGSAPGPSRIADYLLLPLAEREHVSRALCIHTGRELRCKVFPIKHYQDKIRPYIQLPSHSNITGIVEVILGETKAYVFFEKDFGDMHSYVRSRKRLREEEAARLFKQIVSAVAHCHQSAIVLGDLKLRKFVFSTEERTQLRLESLEDTHIMKGEDDALSDKHGCPAYVSPEILNTTGTYSGKAADVWSLGVMLYTLLVGRYPFHDSDPSALFSKIRRGQFCIPEHISPKARCLIRSLLRREPSERLTAPEILLHPWFESVLEPGYIDSEIGTSDQIVPEYQEDSDISSFFC

SEQ ID NO: 130 - protein, 113 aa, Homo sapiens
MGGLEPCSRLLLLPLLLAVSGLRPVQAQAQSDCSCSTVSPGVLAGIVMGDLVLTVLIALAVYFLGRLVPRGRGAAEAATRKQRITETESPYQELQGQRSDVYSDLNTQRPYYK

SEQ ID NO: 131 - protein, 466 aa, Homo sapiens
MSTRSVSSSSYRRMFGGPGTASRPSSSRSYVTTSTRTYSLGSALRPSTSRSLYASSPGGVYATRSSAVRLRSSVPGVRLLQDSVDFSLADAINTEFKNTRTNEKVELQELNDRFANYIDKVRFLEQQNKILLAELEQLKGQGKSRLGDLYEEEMRELRRQVDQLTNDKARVEVERDNLAEDIMRLREKLQEEMLQREEAENTLQSFRQDVDNASLARLDLERKVESLQEEIAFLKKLHEEEIQELQAQIQEQHVQIDVDVSKPDLTAALRDVRQQYESVAAKNLQEAEEWYKSKFADLSEAANRNNDALRQAKQESTEYRRQVQSLTCEVDALKGTNESLERQMREMEENFAVEAANYQDTIGRLQDEIQNMKEEMARHLREYQDLLNVKMALDIEIATYRKLLEGEESRISLPLPNFSSLNLRETNLDSLPLVDTHSKRTLLIKTVETRDGQVINETSQHHDDLE

SEQ ID NO: 132 - protein, 412 aa, Homo sapiens
MTDRQTDTAPSPSYHLLPGRRRTVDAAASRGQGPEPAPGGGVEGVGARGVALKLFVQLLGCSRFGGAVVRAGEAEPSGAARSASSGREEPQPEEGEEEEEKEEERGPQWRLGARKPGSWTGEAAVCADSAPAARAPQALARASGRGGRVARRGAEESGPPHSPSRRGSASRAGPGRASETMNFLLSWVHWSLALLLYLHHAKWSQAAPMAEGGGQNHHEVVKFMDVYQRSYCHPIETLVDIFQEYPDEIEYIFKPSCVPLMRCGGCCNDEGLECVPTEESNITMQIMRIKPHQGQHIGEMSFLQHNKCECRPKKDRARQEKKSVRGKGKGQKRKRKKSRYKSWSVYVGARCCLMPWSLPGPHPCGPCSERRKHLFVQDPQTCKCSCKNTDSRCKARQLELNERTCRCDKPRR

SEQ ID NO: 133 - protein, 355 aa, Homo sapiens
METLKDKTLQELEELQNDSEAIDQLALESPEVQDLQLEREMALATNRSLAERNLEFQGPLEISRSNLSDRYQELRKLVERCQEQKAKLEKFSSALQPGTLLDLLQVEGMKIEEESEAMAEKFLEGEVPLETFLENFSSMRMLSHLRRVRVEKLQEVVRKPRASQELAGDAPPPRPPPPVRPVPQGTPPVVEEQPQPPLAMPPYPLPYSPSPSLPVGPTAHGALPPAPFPVVSQPSFYSGPLGPTYPAAQLGPRGAAGYSWSPQRSMPPRPGYPGTPMGASGPGYPLRGGRAPSPGYPQQSPYPATGGKPPYPIQPQLPSFPGQPQPSVPLQPPYPPGPAPPYGFPPPPGPAWPGY

SEQ ID NO: 134 - protein, 3526 aa, Homo sapiens
MNMVKRIMGRPRQEECSPQDNALGLMHLRRLFTELCHPPRHMTQKEQEEKLYMMLPVFNRVFGNAPPNTMTEKFSDLLQFTTQVSRLMVTEIRRRASNKSTEAASRAIVQFLEINQSEEASRGWMLLTTINLLASSGQKTVDCMTTMSVPSTLVKCLYLFFDLPHVPEAVGGAQNELPLAERRGLLQKVFVQILVKLCSFVSPAEELAQKDDLQLLFSAITSWCPPYNLPWRKSAGEVLMTISRHGLSVNVVKYIHEKECLSTCVQNMQQSDDLSPLEIVEMFAGLSCFLKDSSDVSQTLLDDFRIWQGYNFLCDLLLRLEQAKEAESKDALKDLVNLITSLTTYGVSELKPAGITTGAPFLLPGFAVPQPAGKGHSVRNVQAFAVLQNAFLKAKTSFLAQIILDAITNIYMADNANYFILESQHTLSQFAEKISKLPEVQNKYFEMLEFVVFSLNYIPCKELISVSILLKSSSSYHCSIIAMKTLLKFTRHDYIFKDVFREVGLLEVMVNLLHKYAALLKDPTQALNEQGDSRNNSSVEDQKHLALLVMETLTVLLQGSNTNAGIFREFGGARCAHNIVKYPQCRQHALMTIQQLVLSPNGDDDMGTLLGLMHSAPPTELQLKTDILRALLSVLRESHRSRTVFRKVGGFVYITSLLVAMERSLSCPPKNGWEKVNQNQVFELLHTVFCTLTAAMRYEPANSHFFKTEIQYEKLADAVRFLGCFSDLRKISAMNVFPSNTQPFQRLLEEDVISIESVSPTLRHCSKLFIYLYKVATDSFDSRAEQIPPCLTSESSLPSPWGTPALSRKRHAYHSVSTPPVYPPKNVADLKLHVTTSSLQSSDAVIIHPGAMLAMLDLLASVGSVTQPEHALDLQLAVANILQSLVHTERNQQVMCEAGLHARLLQRCSAALADEDHSLHPPLQRMFERLASQALEPMVLREFLRLASPLNCGAWDKKLLKQYRVHKPSSLSYEPEMRSSMITSLEGLGTDNVFSLHEDNHYRISKSLVKSAEGSTVPLTRVKCLVSMTTPHDIRLHGSSVTPAFVEFDTSLEGFGCLFLPSLAPHNAPTNNTVTTGLIDGAVVSGIGSGERFFPPPSGLSYSSWFCIEHFSSPPNNHPVRLLTVVRRANSSEQHYVCLAIVLSAKDRSLIVSTKEELLQNYVDDFSEESSFYEILPCCARFRCGELIIEGQWHHLVLVMSKGMLKNSTAALYIDGQLVNTVKLHYVHSTPGGSGSANPPVVSTVYAYIGTPPAQRQIASLVWRLGPTHFLEEVLPSSNVTTIYELGPNYVGSFQAVCMPCKDAKSEGVVPSPVSLVPEEKVSFGLYALSVSSLTVARIRKVYNKLDSKAIAKQLGISSHENATPVKLIHNSAGHLNGSARTIGAALIGYLGVRTFVPKPVATTLQYVGGAAAILGLVAMASDVEGLYAAVKALVCVVKSNPLASKEMERIKGYQLLAMLLKKKRSLLNSHILHLTFSLVGTVDSGHETSIIPNSTAFQDLLCDFEVWLHAPYELHLSLFEHFIELLTESSEASKNAKLMREFQLIPKLLLTLRDMSLSQPTIAAISNVLSFLLQGFPSSNDLLRFGQFISSTLPTFAVCEKFVVMEINNEEKLDTGTEEEFGGLVSANLILLRNRLLDILLKLIYTSKEKTSINLQACEELVKTLGFDWIMMFMEEHLHSTTVTAAMRILVVLLSNQSILIKFKEGLSGGGWLEQTDSVLTNKIGTVLGFNVGRSAGGRSTVREINRDACHFPGFPVLQSFLPKHTNVPALYFLLMALFLQQPVSELPENLQVSVPVISCRSKQGCQFDLDSIWTFIFGVPASSGTVVSSIHNVCTEAVFLLLGMLRSMLTSPWQSEEEGSWLREYPVTLMQFFRYLYHNVPDLASMWMSPDFLCALAATVFPFNIRPYSEMVTDLDDEVGSPAEEFKAFAADTGMNRSQSEYCNVGTKTYLTNHPAKKFVFDFMRVLIIDNLCLTPASKQTPLIDLLLEASPERSTRTQQKEFQTYILDSVMDHLLAADVLLGEDASLPITSGGSYQVLVNNVFYFTQRVVDKLWQGMFNKESKLLIDFIIQLIAQSKRRSQGLSLDAVYHCLNRTILYQFSRAHKTVPQQVALLDSLRVLTVNRNLILGPGNHDQEFISCLAHCLINLHVGSNVDGFGLEAEARMTTWHIMIPSDIEPDGSYSQDISEGRQLLIKAVNRVWTELIHSKKQVLEELFKVTLPVNERGHVDIATARPLIEEAALKCWQNHLAHEKKCISRGEALAPTTQSKLSRVSSGFGLSKLTGSRRNRKESGLNKHSLSTQEISQWMFTHIAVVRDLVDTQYKEYQERQQNALKYVTEEWCQIECELLRERGLWGPPIGSHLDKWMLEMTEGPCRMRKKMVRNDMFYNHYPYVPETEQETNVASEIPSKQPETPDDIPQKKPARYRRAVSYDSKEYYMRLASGNPAIVQDAIVESSEGEAAQQEPEHGEDTIAKVKGLVKPPLKRSRSAPDGGDEENQEQLQDQIAEGSSIEEEEKTDNATLLRLLEEGEKIQHMYRCARVQGLDTSEGLLLFGKEHFYVIDGFTMTATREIRDIETLPPNMHEPIIPRGARQGPSQLKRTCSIFAYEDIKEVHKRRYLLQPIAVEVFSGDGRNYLLAFQKGIRNKVYQRFLAVVPSLTDSSESVSGQRPNTSVEQGSGLLSTLVGEKSVTQRWERGEISNFQYLMHLNTLAGRSYNDLMQYPVFPWILADYDSEEVDLTNPKTFRNLAKPMGAQTDERLAQYKKRYKDWEDPNGETPAYHYGTHYSSAMIVASYLVRMEPFTQIFLRLQGGHFDLADRMFHSVREAWYSASKHNMADVKELIPEFFYLPEFLFNSNNFDLGCKQNGTKLGDVILPPWAKGDPREFIRVHREALECDYVSAHLHEWIDLIFGYKQQGPAAVEAVNVFHHLFYEGQVDIYNINDPLKETATIGFINNFGQIPKQLFKKPHPPKRVRSRLNGDNAGISVLPGSTSDKIFFHHLDNLRPSLTPVKELKEPVGQIVCTDKGILAVEQNKVLIPPTWNKTFAWGYADLSCRLGTYESDKAMTVYECLSEWGQILCAICPNPKLVITGGTSTVVCVWEMGTSKEKAKTVTLKQALLGHTDTVTCATASLAYHIIVSGSRDRTCIIWDLNKLSFLTQLRGHRAPVSALCINELTGDIVSCAGTYIHVWSINGNPIVSVNTFTGRSQQIICCCMSEMNEWDTQNVIVTGHSDGVVRFWRMEFLQVPETPAPEPAEVLEMQEDCPEAQIGQEAQDEDSSDSEADEQSISQDPKDTPSQPSSTSHRPRAASCRATAAWCTDSGSDDSRRWSDQLSLDEKDGFIFVNYSEGQTRAHLQGPLSHPHPNPIEVRNYSRLKPGYRWERQLVFRSKLTMHTAFDRKDNAHPAEVTALGISKDHSRILVGDSRGRVFSWSVSDQPGRSAADHWVKDEGGDSCSGCSVRFSLTERRHHCRNCGQLFCQKCSRFQSEIKRLKISSPVRVCQNCYYNLQHERGSEDGPRNC

SEQ ID NO: 135 - protein, 345 aa, Homo sapiens
MQPSGHRLRDVEHHPLLAENDNYDSSSSSSSEADVADRVWFIRDGCGMICAVMTWLLVAYADFVVTFVMLLPSKDFWYSVVNGVIFNCLAVLALSSHLRTMLTDPEKSSDCRPSACTVKTGLDPTLVGICGEGTESVQSLLLGAVPKGNATKEYMESLQLKPGEVIYKCPKCCCIKPERAHHCSICKRCIRKMDHHCPWVNNCVGEKNQRFFVLFTMYIALSSVHALILCGFQFISCVRGQWTECSDFSPPITVILLIFLCLEGLLFFTFTAVMFGTQIHSICNDETEIERLKSEKPTWERRLRWEGMKSVFGGPPSLLWMNPFVGFRFRRLPTRPRKGGPEFSV

SEQ ID NO: 136 - protein, 595 aa, Homo sapiens
MRETLEALSSLGFSVGQPEMAPQSEPREGSHNAQEQMSSSREERALGVCSGHEAPTPEEGAHTEQAEAPCRGQACSAQKAQPVGTCPGEEWMIRKVKVEDEDQEAEEEVEWPQHLSLLPSPFPAPDLGHLAAAYKLEPGAPGALSGLALSGWGPMPEKPYGCGECERRFRDQLTLRLHQRLHRGEGPCACPDCGRSFTQRAHMLLHQRSHRGERPFPCSECDKRFSKKAHLTRHLRTHTGERPYPCAECGKRFSQKIHLGSHQKTHTGERPFPCTECEKRFRKKTHLIRHQRIHTGERPYQCAQCARSFTHKQHLVRHQRVHQTAGPARPSPDSSASPHSTAPSPTPSFPGPKPFACSDCGLSFGWKKNLATHQCLHRSEGRPFGCDECALGATVDAPAAKPLASAPGGPGCGPGSDPVVPQRAPSGERSFFCPDCGRGFSHGQHLARHPRVHTGERPFACTQCDRRFGSRPNLVAHSRAHSGARPFACAQCGRRFSRKSHLGRHQAVHTGSRPHACAVCARSFSSKTNLVRHQAIHTGSRPFSCPQCGKSFSRKTHLVRHQLIHGEAAHAAPDAALAAPAWSAPPEVAPPPLFF
